United States Patent Application Publication US 2025/0236838 A1 - sequence listing, part 6

SEQ ID NO: 2 - DNA, 5413150 bp, Escherichia coli (residues 3,608,769-5,413,150 of 5,413,150)
  source 1..5413150: mol_type = genomic DNA
tccagcgtggtggtgccggtgcatgttcgggacttactggctaccagcacaaactcggactcgaacagcggctcaacatgtaaatcctgaagcttcatttctgcgcttaacgtaccaatcgcaaaatccagtcgaccgtcgcggattgccggtaagaacgaagacagttgcgcttcatacatagaaacctgcgctttcgggaacacctctttgaacttgttgatcatccctgacataaaagtaaaaccaatcaatgaaggaaaaccaaatgagacttccaccaccgcctcagaagacataccgcttatctcattaaccatatttttcatttcacgggtaatggattcggaacgggagagtaacaattgaccggcaggtgttaatgttacaccggtatttttccgcaccactaactccaccccaaaataatcttcaatatcgttaatgattttactgacggccggttgagttaaccctaactcttttgcagccgagccgatagaaccacttctaataacttcctgaaagactaccaggtgctgcgttttcggaagaagaatagtgctcataacgacctacgttaattacctcattgacggtatgaagtgtatcaaaatgaaatgaacaggatatgtgcgaccactcacaaattaactttcaatactttccatggcatcgtcaccaaaattaaatacccttaagtatcaacaagttaaagtatgaaaatcagcataaaccctgacttttgtcaaaaaaaatgacggggataaccatattttatggcgataacatcattctttatgtggttaatacaaaaaaggggctgagactatatttcaagcaattaccggataattaccaggcaaaatttgagttaaatttaatgagtaagttctcaaattttattataaacaaaccattttcagcgataaataatgcggcacgtcacattttttcacgctatttgttggagaacaaacatttattttatcaatattttaaaatttcgaatacaggtattgatcatctcgaacaattgattaacgtcaactttttctcttctggcaggacgtcattttgtgaatgcaatcgttttccataaattcttctcccctcataggcaacgaatagcattttgtgttgaggatcacaaaacgaataattgctggtcgccgcgataaggtcagacgaagtcaacaaggaggattttcgctgtgctttacatcagcgtaggccatagaatgttgcttcgttgactgtaatgccgggtaaatgagcattttttgatagtgcgaaagaaccctgcgaggaaaataagcatctattattgtttgtcatgatgacaaggctggcatcaatgaaaggcttctcaattgcacatatttttcacccttcaatgcacgcagtggttaacaatcacaatagaaatattgattattggacggtaaaaatttaggttataacgcccaaatgattcaacgatcggacaatacctgcgaacttacaattaatgagagaaatatatgtataattacgaccttttaaatgcaatatagacttaataacttcttacaaagtctgttattaataccgtagatattcatcttaccctgggcaccaaaagcaaaaacccgccgaagcgggtttttacgtaaatcaggtgaaactgaccgataagccgggttctgtcgtggacagtcattcatctaggccagcaatcgctcactggctcaagcagcctacccgggttcagtacgggccgtaccttatgaacccctatttggccttgctccgggtggagtttaccgtgccacggactgttaccagccgcgcggtgcgctcttaccgcaccctttcacccttacctgatcccgcttacgcgggccatcggcggtttgctctctgttgcactggtcgtgggtttcccccccaggcgttacctggcaccctgccctatggagcccggactttcctcccctccgcccgtctcccccgaagaggacgacgacgaagcggcgactgtctggtcagcttcggcgcgcagtatagagggtttgcgcgcccttgtcaccccgcgttgcgcattccaatcgccagtgtcgcggcgatattacgtgaagcacggcagatattgtcataagctccgcggagtgcttcgtctaacgtaccaatgctggtcagtacgctgaagaccgcatcaatgccatgctgatgtacaacgccaacatcattggtcaggctacccgcaatgccaatcaccggtttatggtacttcttcgccacgtttgcgacaccaatcggtaccttgccgtgaatactctggctatcaatacgcccttcaccagtgatcaccagcgtacaatcgtgaatatgttcctccagattcagcgccgtagtgacgatttcaataccacttttcagttctgcaccaagaaacgccatcagcgccgcgcccataccgcccgcagctcctgcgccggggacatctttcacatcaacatgcagcgcttttttaataacatcggcatagtgagagaggttattgtccagctcgacaatcatcgcctcactggctcccttttgtgggccaaagatgcgcgaagcaccactgtcgccgactaacgggttggtgacatcacaagcgacgcggatgacacaatcttttaagcgcggatcgagaccggaaatatcaatatcattcagagtattaagactaccgccgccaaaaccaatttcattgccgttggcatcgcataatttcgcccccagcgcctgtaccatgcctgcgccgccgtcgttggtggcgctgccgccaatgccgataataatgtttgtcgcaccgctctccagcgcctgcaggattaactcgccagtaccgcgtgaagtggtcacgagtggatcgcgtttttccgcaggtaccagttccagcccactggccgccgccatttcgataaacgcggttttgccatcgccggagatcccccaactggcattcactttctcgcccagcggccctgtaacccaggcgtgacgttcagccccctgggtggctgcaatcatcgcttccaccgttccttcaccaccgtcggcaaccggaacagaaacatactgtgcatcaggaaaaatttcccgaaatcctttttctatcgcctgcgcaacctcgctggcagataaactttctttataagagtctggggcgattacgattttcatacctatgcctgttaccacatgacgccggagggcgtttctcttattcggcctggattccaggcccggattgcaatacgccatccgggcacgacgtcattagcgagtaacttcgactttcgccagtttttcgtagtagcacgccagggcgctatgatccgccgttcctaaaccatctgcacgcagtgcctgcatcatctccataaccgcagctgtgagcggcagttgcgcgccgacgccgtgagaagtatccagcgcattcgccagatccttaatatgcagatcaatacggaagcccggtttgaagttgcggtccatcaccatcggcgctttggcatccagcacggtactgcccgccagcccaccgcgaattgcctgatacaccagatccgggttaacgcccgctttggttgccagcgttaacgcttctgacatcgcagcaatattcagcgccacaatgacctgatttgccagtttggtgacgttacctgcaccgatttccccggtatgcaccacggaacccgccatcgctttcatcaaatcatagtatttgtcgaaaatagccttgtcgccgcccaccatcactgacagcgtaccgtcgatggctttcggttcaccgccgctcaccggggcgtccagcatatcaatgcctttcgctttcagcgcttcgctgatttcacggcttgccagcggtgcgatagaactcatatcgatcaataccgtacctggcttcgcgccttcaataatgccattctcacccagcgccacctctttcacatgaggggagtttggcagcatggttatgatgacgtcgcactgttcagcgatcgctttagccgtagaggctgtttctgcacctgcagcaatcacgtcagcaatagcttctgggttacggtcagcaaccaccagcgagtaacctgctttcagaaggtttttactcattggtttacccataatccccaggccaataaaaccaactttcatagtcatatcaatcatctctcttgttgcggtggtggttattttttaaaggtatcagccagtttctgagtggcagagcggaagatgccgagatcgctgccgacagccacaaacgtcgcaccccattccagataacgacgcgcatcagcctcgactggtgcgaggatgccgctgggtttgccgtgcgcgctggcacggttaaaaatgtgctgaattgctttttgtacatccgggtgcgaggcattgccgagatggcctaatgccgcagccagatcgctggggccgacgaagatgccgtctacaccttcggtagcggcaatagcatcgacgttatctacgccctgctgactttctatctggaccagaatagtgatgttcttgttcgactgagcgaaataatccgccacggtgccaaacatattggcgcggtgagaaacggagacgccgcgaatgccttccggtgggtaacgagttgatgccaccgcctgctctgcttcctcttttgtttctacaaaaggaatcaggaagttatagaaaccgatatccagaagacgcttaataattaccggctcgttggtcggcactcgcactactggcgcgctggcgctgcctttcagggccattaactgcggaataaacgtggagatatcgtttggcgcatgttcaccatccagcaccagccagtcaaacccagccaaaccaagaacttcagtgctaatcgggttagagagagctgaccagcaaccaatttgtacctgtttcgcagccagtgcggctttgaatttattcgggaaaacatcgttattcatcgcttatacctttgcttatttctgcaattccatacgtttaatgtcgccgactacgaagaggtagcagaccatcgccatcagcgctgaacatcccacaaaaaccagtgctgcattgaaggagtgcagttcacttaccaggtagccaatcaccagtggagtgacaatggaggcaacattgccaaagacgttaaagacgccgccgcagaggccaacaatctctttcggcgcggtgtcagaaatcactggccagcccagcgcaccaaatcctttgccaaagaaagccagcgccatcagcatgaccaccagcgtggtgttgttggtgtagttacataagatgatggtggaagccagcaacattcccagcacaattggtagcttacgtgccagggtcagggacaaaccgcgtttgatcagataatccgagaagacacctcccagcacgccgcccgcaaagccacacagtgccggaatcgaggcgaccagacccactttcagaatcgacatgcctttttcctgcaccagataaattgggaaccaggtgaggaagaaccaggtgatggtgttgataaaatattgtccgaaaaatacgcccagcatcatgcggttagagagcaattgcttgatgtaatgcagtttgggtccgcttgctgccgcactgcccggctttttgtggtccatatcgaccaccgcgccattttccgagataaacttcagctcttccgcagacatacgtgggtgatctgtcgggttatgaatcaacttgatccacagcgccgtcagcacaaaaccaatcacccccataacggtaaagacgtgctcccagccccaggcgaaagtcagccagccaagcagcggcgaaaagagcgccaacgagaaatattgcgccgagttaaagatggcggaggcagtaccacgttctttcgtcgggaaccaggcggcgacaatacgggcgttcgccgggaatgatggcgcttccgagaaccccagcataaagcgcataaagaacatggagatcccagcccaggccagcggaaacatatcgacaaagccttgcaggaaggtgaacagcgaccagaaaaagaggctgtaagtgtaaactttcttcgagccaaacttatcaagcagccagccgccgggaatttgcatcagcaagtaggcccagccaaaagcagagaagatgtaacccatcgaaaccgcacttaactgcaactcttttgccacttcggtaccagcaatagacagcgttgcacgatcggcgtagttaacggcggtaacaataaaaataatcagtaatattaaatagcgggtatgcacgcctttctttttttcgtcaacggtgtccagcatcattttatttacctcgggtacttatgctgatttttattattatggggaaggtgttatttatgagtttcatttatgccgttacgacaatgaactcgggaattagtataagcagcgcgagaataataatcattgtgcaaatgctaatttaattaatactatttaaatattattttgagcatatgcacataaggttgcgcgctaaagcacagatttgcgctttaccttgccgggaggtactgcaatccctgaaatgattgacattgatcacatttctgcatttaaactcctgacattcttatttcacccaatgaagttatttatttttaaatgagaccaggtcctcattttaatagtccctggctggagaatattgcacaatggccaacatcaaaatcagacaagaaacgccaactgcgttttatataaaagttcacgacacagataatgtggcaattattgttaatgataatggcctgaaagcaggaacgcgttttccggatgggctggaattaattgaacatattccccaggggcataaagtcgcattgctggacattccggctaatggtgaaattattcgttatggcgaggtgattggttacgccgtgcgcgcaatcccacgcggaagctggatcgacgaatcaatggttgtactaccggaagcgccgccgttacatacgctgccactggcaaccaaagtcccggaacccttaccgccgctggaaggatacacctttgagggctatcgcaatgccgatggcagcgtgggcaccaaaaacctgctcggcatcaccaccagcgtccactgtgtggcaggcgtggtggactacgtagtaaaaatcattgaacgcgatctgctaccgaaatacccgaacgtcgatggcgtggtggggctgaatcatttgtacggttgtggcgtggcgattaacgcacccgcggcagttgtacctattcgtaccattcacaatatttcgctgaaccctaactttggcggcgaagtaatggtgattggtctgggttgtgaaaagttgcagcctgaacgcctactgactggaacggatgatgtgcaagctattccagtagaaagcgccagcattgtcagtttgcaggatgaaaagcatgtcggttttcagtccatggtcgaggatattttgcaggtcgccgaacgccatctacaaaaactgaatcaacgtcagcgagaaacctgtccggcttcagaactggttgtcggcatgcagtgcggtggcagcgatgcgttttctggcgtaacggcaaacccggcggttgggtatgcgtctgatctattggtgcgctgcggcgcaacggtgatgttttcagaagtcacagaagtgcgtgacgcgatacatctgctgacaccacgcgctgtgaacgaagaggtcggcaaacggctgctggaggagatggagtggtacgataactatctcaatatgggaaaaaccgatcgcagcgccaacccttcgccggggaacaagaaaggcggtctggcaaatgtggtggagaaggcactcggctccattgctaaatcgggtaaaagtgcaattgttgaagtgctgtcgcccggccaacgcccgactaaacgcggattaatttacgccgcgacgccagccagcgattttgtctgtggcacgcaacaggtggcttcgggtatcaccgtgcaagtgtttacgaccggtcgtggtacgccgtacggcctgatggcggtacccgtcattaaaatggcgacccgcaccgagctggcgaaccgctggtttgatttaatggatattaacgcgggcactatcgctaccggcgaagaaaccattgaagaagtgggctggaagttgtttcactttattctcgacgtcgccagcgggaagaagaaaactttctcggatcaatggggactgcataaccagctggcggtgtttaacccggcaccggtgacctgatttcttttggaacgtccctcgcaaaacatggccttagtgccatgtttttattgtttaaagtccacacatccattaataatgcatttgcattaccttagttcaagcttataatttgagcagaaaacaggctgtaaaaggacagtaaataatgcccgctaatgctcgctctaacgctgtactgaccactgaatcaaaggtcactatacgcggacaaacaactatccccgcgccagtgcgtgaggccttaaaactgaagcctggcctggacagcattcattacgaaattctgcctggtgggcaagtatttatgtgccgactgggagatgaacaggaggatcatactatgaatgcatttttgcgttttctggatgcagatatccagaacaacccgcaaaaaactcgtccattcgacattcaacaaggaaagaaacttgtcgctggcatggacgtcaacattgacgatgagattggcgacgacgaataatggattttccacaaagggttaatggttgggcgctatatgctcatccctgttttcaggaaacctacgatgctttagttgccgaagtcgaggcattaaagggaaaagatcctgaaaattatcagagaaaagctgccacaaagttattggcggtggtccataaagtgattgaggagcatatcacggtcaatccatcatcaccggcattccgtcatggcaagtcgttaggctctgggaaaaataaagactggtcacgggtaaaatttggcgctggtcgctatcgtctcttctttcgttacagtgaaaaagagaaagtcatcattctgggatggatgaacgatgaaaacacgctgcgcacctacggtaaaaaaacagatgcctataccgtattcagtaaaatgttaaaaagaggacatcctcctgccgactgggaaagcctcacccaagagacagaagaaagccattgatggtgttcacaatgcccgccgaacgcattggtgttgaccagcgggcatcctttctcattccccgaccagaatcacttcaaccccagcctttctcagtccttccagactatccgcaggaatgccttcatcaacaatgatcatgtcgatacgttgagtatcaatgatcttatgtaaactagaacgattgaacttactggaatcggtgaccacgatgatccgttccgcaacttcgcacatccgacggtttaaacgggcttcatcttcattatgcgtgctgacgccgcgctccagatcgatcgcatctacaccaagaaacagcatatcgaagtggtaattttgcagcgattgctcagcctgatcaccgtaaaaagattgcgactgacggcgcaaatgccccccggtcatcagcagctcaacgccttccgcttccagcaacgcattagccacgttcataccgttggtcatcgcaattacgtcagtgtgcttgcgcatcagacgagcaatctcaaaagtggtggtcccggagtcgaggatcacccgatgaccaggctgaatcaactcaacggcagctttcgcaacgctgcgtttcatcgcggtgttcagcgcgcttttatcttccactgatggctcgactgacggcgttgtgctatcgcagatcaacgcgccaccataggcacgcacagcgatcccctgcttttccagaaacgccagatcgttgcggatcgtcacagtagatacaccatacaacgccgatagatcattaacttgcacacttccttgctggcgcaggcgttgaatgatctgttctcgtcgctcgctggtgcctgtcactcgcttctcacctgaagcgtcggtattactcatagtaagtcctttcgtaaaactttcgtttcatttcgttttgcctattaacgcctttctattaagcaaatgcaagcccaccttacccattggcgcaagctactctcgtttcagtggctttcattatgtttcttttgtgaatcagatcagaaaaccattatctttcgttttatttttatctcaccatgacgcagtatcaactgaaacaaaacgaaagattaatgtcgcagtaatctgaactggagaggaaagtgaaacatctgacagaaatggtgagacagcacaaagcgggcaaaacaaatgggatttacgccgtttgttccgcacatccgctggtgctggaagctgcaatccgctacgccagtgcaaaccaaacgccgttactgattgaagcaacctccaatcaggtggaccagttcggcggttataccggaatgacgcccgccgattttcgcggctttgtttgtcagctcgccgactcgttgaatttcccgcaggatgcgctgattctgggtggtgaccatctggggccaaaccgctggcaaaacctgcctgccgctcaggcaatggccaatgccgatgatttgattaaaagctacgtggcggcaggattcaaaaaaattcaccttgattgcagcatgtcctgtcaggacgatccgattcccttaactgatgacatcgtggctgaacgcgccgcccgtctggcgaaagtggcggaagaaacctgtcttgaacactttggcgaagccgatctggagtatgtcattggtaccgaagtcccggtgcctggcggcgcgcatgaaaccttaagcgagctggcggtcaccacgccggatgccgcccgcgccacgctggaagcccatcgtcacgcttttgaaaagcagggtctgaatgccatctggccacgcatcattgccctggtggttcaacccggcgtcgaattcgatcacaccaacgttattgattatcagcccgccaaagcgaccgccttaagccagatggtcgaaaactacgaaacgctgattttcgaagcgcactctaccgattatcaaacaccgcaatcgctgcgccagctggtgattgaccactttgccattctgaaagttggcccggcgctgacctttgctctgcgtgaagctctgttctctctggcggcgattgaagaagaactggtgccagcaaaagcctgttctggtctgcgtcaggtgctggaaaacgtgatgctcgaccgcccggaatactggcaaagccactaccacggtgacggcaacgcgcgtcgtctggcgcgtggttatagctactcggatcgcgtgcgctattactggccggacagccagattgatgacgctttcgctcatctggttcgtaatctggcggattcaccaattccgctgccgctgatcagtcagtatctgccgctgcagtacgtgaaagttcgctccggcgagctgcagccaacgccacgggaactcattatcaaccatattcaggacatcctggcgcagtaccacacagcctgtgaaggccaataagcaaaacaaagaggaacacgctatgccaaatattgttttaagtcggattgatgaacgcttgattcacggtcaggtcggcgttcagtgggtcggatttgcgggggcaaatctggtgctggtagccaacgacgaggttgccgaagatccggtacaacaaaacctgatggaaatggtactggcagaagggatcgccgtacgtttctggacgctgcaaaaagtcatcgacaacattcatcgcgccgccgatcgacagaaaatcctgctggtttgtaaaacaccggccgatttcctgacgctggtgaaaggtggcgttccggtgaatcgcattaacgttggcaatatgcactacgccaatggcaagcaacaaatcgccaaaacggtttctgtggatgcgggtgatatcgcagcatttaacgacctgaaagccgctggggtggaatgcttcgttcagggcgtcccaacagagcctgctgtggacctctttaaattactttgagggattcatcatggaaatcagtctgttgcaggcatttgcgttgggcattatcgcctttatcgctggcctggatatgtttaacggcttaacccatatgcaccgcccggtggttctcggcccgttggtcgggctggtacttggcgatctgcataccggtattttaaccggcggtacgctggaactggtgtggatggggctggcccctctggcgggcgcacagccgcctaacgtgattatcggtactatcgtcggcacggcgtttgccattactactggcgtgaaacccgatgtcgcggtcggtgtcgccgtacctttcgctgtcgcagtacagatggggattaccttcctgttctcggtgatgtctggcgtgatgtcccgctgcgaccggatggcggagaacgccgatacacgcggcattgaacgcgtgaactatctggcattgctggcactcggcactttctattttctctgcgctttcctgcctatctacttcggcgcagaacatgccaaaaccatcattgatgtcctgccgcaacgattaatcgacggcctcggcgtcgcgggcggcatcatgccagcaatcggttttgccgtgctgctgaaaatcatgatgaaaaacgtctacatcccctacttcatcctgggctttgttgccgcggcctggctcaagttaccggtgctggctattgctgccgccgcgctggcgatggcgctgatcgacctgctgcgtaaatctcctgaaccgactcaacctgcggcacagaaagaggaatttgaagatggcatctaatcaaaccaccctgccgaacgtcagtgaaaacgaagaaacactgctgactggcgtcaatgaaaacgtgtatgaagatcagagcattggcgcagagctgacgaaaaaagatatcaaccgcgtcgcctggcgttccatgctgttacaggcttctttcaactacgaacgtatgcaggcttccggctggctgtacggcctgctgccagcactgaaaaagatccacactaataaacgcgacctggcgcgcgccatgaaggggcatatgggtttcttcaatacccatccgtttctggtgacgtttgttatcggcattatccttgcgatggagcgttctaagcaggacgttaacagtattcagagcaccaaaattgccgtcggtgcgccgctcggcgggattggcgatgcgatgttctggctaacgctactgccgatttgtggcgggataggtgcaagcctcgcgctacaaggctctattcttggcgctgtcgtctttattgtgctgttcaacgtggtgcacctggggctgcgttttggtctggcgcattatgcttaccgcatgggcgtggcggcgattccactcattaaagcaaataccaaaaaagtcggccatgcggcatctatcgttgggatgacggtaatcggcgcgctggtggcaacctatgttcgtttaagcaccacgctggaaatcaccgcgggcgacgcagtggttaagttacaggctgatgttatcgacaaactgatgccagccttcttaccgctggtctacaccctgaccatgttctggctggtacgccgcggctggagtccgctgcgcctgattgcgattaccgtggttctcggcatcgtcggtaaattctgccatttcctttaaatacaatgaggtattagatgttaagtattattttgacagggcatggcggatttgccagcggcatggaaaaagcaatgaagcaaattctcggtgagcaatcgcagtttatcgccatcgattttccggaaacctcaagcaccgcgctgcttacatcgcagcttgaagaggccatcgcccaactggattgtgaagacggcattgtttttctgacggatttgctgggcggcacgccgtttcgcgtagcttcaacgctggcgatgcaaaaaccgggctgtgaagtgatcaccggcaccaatttgcaactgctactggaaatggtgctggagcgcgaagggttaagcggtgaagagttccgtgtgcaggcgctggagtgtggacaccgtgggctgaccagtctggtggacgagttaggccgctgccatgaagaatgtccggtcgaggaaggaatatgacacacgttctgcgcgccagaaggctgctgactgaagagggatggctcgatgaccatcagttgcgtattgctgacggtgtaatcgcagcaatcgaaccgattccagtgggcgtgactgaacgcgatgcggaactgctctgtcccgcttacatcgacacccatgtacacggtggtgcgggcgttgatgtaatggatgacgcgccggatgtgctcgacaagctggcaatgcacaaagcacgcgaaggtgtcggcagttggttaccgaccaccgtaaccgcgccgcttaataccattcatgcggcgctggaacgtattgctcaacgttgccaacgcggcggacctggtgcgcaagtgctggggagttatctcgaaggaccgtacttcacgccgcagaataaaggcgcgcatccaccggagctgttccgcgagctggaaattgccgagctggatcaattgattgccgtttctcagcataccttgcgcgtggtggcgctggcaccggaaaaagaaggggcattgcaggccatccgccatcttaaacagcaaaacgtacgggtgatgctggggcatagcgcggcgacctggcaacaaacccgtgccgcgtttgatgctggtgccgacggcctggtgcattgctataacgggatgacaggtttacatcaccgcgaaccgggaatggttggcgcgggattaacagacaagcgcgcctggctggaactgatagccgatggtcatcatgtacatccggcggcaatgtcgctctgttgttgctgtgcgaaagagaggatcgtactgatcaccgacgcgatgcaggcagccgggatgccggatggtcactatacgttatgtggtgaagaagtgcagatgcgcggtggcgttgtccgtaccgcgtccggtgggctggcgggcagtacgctgtctgtcgatgcggcagtgcgcaacatggtcgagttgacgggcgtaacgcctgcggaagccatccatatggcgtcgctgcatccggcgcgaatgctgggtgttgatggtgttctgggatcgcttaaaccgggcaaacgcgccagcgtcgttgcgctggatagcgggctgcatgtgcaacaaatctggattcagggtcaattagcttcgttttgatggtttgctcctttattaggccttcacttcccccgtaaggccttctttttctttcgttttgatctgtgcagcggtgtcggatgcgacgctaatgcgtcttatccgacctacggttggtgaccgtaaggccggataaagtatttacgccgcatccagcaatcccttttacttcccttgccttttctttcaacgatcacagatttcgttttatttcctttttcttcattgaactttcagtttcttttctataaattttaaccaacgaaagaaatcaccaagtgaaatgaaacgaaaggcaagcgaaagcgacaacgccgacgtcaagttcatcagactaaggattgagttatgccagaaaattacacccctgctgctgccgcaaccggtacatggactgaagaagagatccgccatcagcctcgcgcatggatccgttcactcaccaacatcgacgcgctacgttccgcgctcaataacttccttgaaccgttactgcgcaaagagaatctgcggatcatcctgaccggagccggaacctcggcatttatcggtgacatcatcgcgccgtggctcgccagccataccggtaaaaacttcagcgccgtaccgaccaccgatctggtcactaatccgatggactacctgaatccagctcatccgctgctgttgatctccttcggtcgatccggcaacagcccggaaagcgtcgccgccgtggaactggcaaatcaatttgtaccagaatgctatcacctgccgatcacctgcaacgaagcgggcgctctttaccaaaacgcgatcaacagcgacaacgcgtttgccctgctgatgcccgcagaaacgcacgatcgcggcttcgcgatgaccagcagcattaccaccatgatggccagctgcctcgcggttttcgcacctgagacgatcaacagccaaaccttccgcgatgtggcggatcgttgccaggcgatcctgacctcactgggcgatttcagcgaaggtgtgtttggttacgcaccgtggaaacggatcgtttatctcggcagcggtggcttacagggcgcagcacgcgagtcggcgctgaaagtgctggaactgacagcgggtaaactggcggccttctatgattccccgaccggattccgtcatggcccgaaatcgctggtcgataacgaaacgctggtggtggtgtttgtctccagccacccttacacccgtcagtatgatcttgatctgctggcagaactccgccgcgataaccaggcaatgcgcgtaatcgccatcgccgcggaaagcaacgacgttattgccgccggtccacatatcatcctgccgccgtcccgtcactttatcgacgttgagcaggcattttgcttcctgatgtacgcccagacatttgcactgatgcagtcgctgcacatgggtaatacgccggataccccatcagccagtggcaccgttaaccgcgtggtgcaaggcgtaatcattcatccgtggcaggcataagaggatcgcattatgagcattatctccaccaaatatctgttacaggacgcccaggccaatggctacgcggtgcctgcctttaacattcataacgccgagacgatccaggcgatcctcgaagtgtgcagtgaaatgcgatcgccggtgatcctcgccgggacgccggggacctttaagcatatcgcgctggaagagatctacgccctgtgtagcgcctattccacgacctataacatgccgctggcactgcatcttgatcaccacgaatcgctggatgatattcgccgtaaagtccacgcaggcgtgcgcagcgcgatgatcgacggcagtcatttcccgtttgccgagaacgtgaagctggtgaaatcggttgtcgacttctgccactcccaggattgcagcgtggaagcagaactgggccgcctcggcggtgttgaagatgacatgagcgttgacgccgaaagtgcattcctgaccgatccacaagaagctaaacgctttgtcgaactgactggcgtcgacagcctggcggtagcgattggtacggcgcacggcttatacagcaaaacgccgaagattgatttccagcggctggcggaaattcgtgaagtggtggatgttcctctggtgctgcatggtgccagcgatgtcccggatgaatttgtccgtcgcactattgaacttggcgtaacaaaagtgaacgttgccacagaattaaaaatagccttcgctggcgcggttaaagcctggtttgcggaaaatcctcagggtaatgatcctcgttattatatgcgcgtcggaatggatgcgatgaaagaagttgtcagaaataaaattaatgtctgtggttcagcgaatcgaatttcagcataatcattagttttttatgatttatcccaatgtacttcccgattaatatcggggagtgccttaatggtaaaggagataactaaaccttaataaatacatcagtacaatatcgcaacaataatatatttaaaaagattatattattcaactttatggtgaggattacacaatgagcagtccaaatattctcttaacccgtattgataaccgtctggttcacggtcaggttggcgtgacctggacatccaccatcggtgcgaatctgttggtagtcgtggatgatgttgtcgctaacgatgatattcaacagaaattaatgggtattaccgcagaaacctacggctttggcattcgtttctttactatcgaaaaaaccattaacgtcatcggcaaagctgcaccacatcagaagatcttcctgatttgccgtacgccacaaacggtacgtaaattggtagaaggtggtattgacctgaaagatgtcaacgtcggcaatatgcatttctcggaagggaaaaagcaaatcagcagtaaagtttatgtcgatgaccaggatctcacggacttacgttttattaaacaacgtggcgtgaatgttttcattcaggacgtccctggcgatcaaaaagaacaaatccctgactaaatctaaaatcgccttaatattggtttgaggtaataaaaatgcatgaaataaccctactccagggattatccctggcggcgttagttttctttctggggattgatttttggctggaagccttatttttattccgcccgataatcgtttgtacccttacaggtgctattctcggtgatattcagactggcttaattaccggtggcctgacagagttggctttcgccggattaacccctgcaggtggtgttcagccgcccaaccctattatggcgggtctgatgaccactgtcattgcatggtctacgggcgttgatgccaaaacggcaattggtcttggcctgccgtttagtttgttaatgcagtacgtcattctgttcttctattccgctttctcattatttatgaccaaagccgataaatgcgcaaaagaggcggatacggcagcattttcccgacttaactggacaacgatgctcatcgtcgcttcagcgtatgcggtgattgctttcctctgtacttacctggcacaaggggcgatgcaggcgctggtgaaagcgatgcccgcctggctgacccacggctttgaagtggctggcggtattctgcctgccgttggttttggcttgctgctgcgcgtgatgttcaaagcgcaatatatcccttacctgatcgccgatttcctgttcgtttgctacatccaggtcagcaacctgttgccggttgccgtactgggcgcaggctttgcggtgtatgagtttttcaatgcgaaatcccggcagcaagcgcaaccgcagcccgttgccagtaaaaatgaagaagaggactacagcaatgggatctgaaatcagtaaaaaagatatcacccgtctgggctttcgttcgtcactgctacaagcaagctttaactacgaaaggatgcaggcgggcggttttacctgggcgatgttgccgatcctgaaaaagatttataaggacgacaaaccgggcctaagcgcggcgatgaaagataacctcgaatttattaatacccaccctaatctggtcggattcctgatggggttattaatttcgatggaagaaaaaggagaaaaccgcgacaccattaaaggcctcaaagtggcgctgtttggcccaatcgccgggattggcgatgcgattttctggtttaccttgttgccaattatggcggggatttgctcatcgtttgccagtcaggggaacctgttgggaccgattttgtttttcgccgtttacctgcttatctttttcctgcgcgtcggctggacccacgtcggttattcagtcggcgtgaaggctatcgataaagtgcgagagaactcgcagatgattgctcgttcggcaaccatcctcgggatcacagtaatcggcgggctgatcgcttcgtatgtgcatattaacgtggtgacgtcgtttgccatcgacagtacccacagcgtcgcactgcaacaggatttcttcgataaagtcttcccgaatattttaccgatggcctacaccctgctgatgtattacttcctgcgggtgaaaaaagcgcatccggtgctgttaatcggcgtgacgtttgttctttctattgtttgttctgcattcggcattttgtaaatggaacgaggcaccgcgtctggcggtgcctctttacttaaggaatttcatcctgtgcaaccccttcaacaagttgaaaactatacggcattaagtgaacgtgccagcgaatatttattggccgtgatccgtcgcaaaccggatgccgtgatttgcctggcgaccggagccacgccattactgacgtatcattatctggtagaaaaaatccaccagcagcaggttgatgtcagccatctcaccttcgtgaagctcgacgaatgggtggatctgccattaacgatgcctggcacctgcgaaactttcctacaacagcatatcgtgcagccgctggggctgcgtgaagaccagctcatcagctttcgctccgaagagataaatgagacagagtgcgaacgggtaacgaacctgattgcgcgcaaaggcggtctggatttatgcgttctcggattggggaaaaacggtcatcttgggctgaacgaaccgggagaaagcctgcaaccagcctgccatatcagtcaacttgatgccagaacacagcaacatgagatgttaaaaaccgcggaccgtcccgtgactcgtgggatcaccttaggcctgaaggatattctcaatgcccgcgaagttttgttactggtgactggcgaaggaaaacaggatgcgacagaacgttttctcacggctaaagtctccaccgctatcccggcttcatttttatggctgcataaccatttcacatgcgtgattgatgaaatgtgtcgtcgttaactcgccaggtaaaggcgttgtagcgctattcctgctgcgacgcctgtaatcactctccctgctgctccagcgcatacttatacagcgcatttttcttcacgccgtgaatttctgcggccagcgccgccgcttttttcagcggcagttctgcctgtagcagcgccagcgtgcgcagggcatcagcaggcaagtcattttcctgcgctttatggccttcgacaatcagcaccatttcgcctttgcgacggttttcatcttcttttacccacgccagcagctcgccaacgggcgcgccgtgaatggtttcccaggttttggttagctcacgcgccagaaccacgtaacgggattcgcctaataccgcaacgatatcttccaggctatctaacagacggtgggtagattcataaaaaatcagcgtgcgcggctccgcttcaatagcttttagcgcatcacggcggccttttgatttggcaggtaaaaagccttcataacaaaaacgatcggatggtaaacccgcggcgcttaacgcagtgatagcagcacacggccctggtagcggcaccacgcgaatccccgcttcacgacaggtacgcaccagatggtagccaggatcgttaattagcggcgttccggcatcggaaaccagcgcaatgttttgcccctcttgcagcttcgccagcagcgtttcggctttttgttgttcattatggtcgtgcagcgcaaacaaccgggcattaatcccaaaatgttgcagcaataaaccggtgtgacgcgtatcctcggcggcaatcagatcaacggcctgtaatacctccaacgcacgctgggtgatatccgccagattgccgattggcgtcggtacaatgtaaagctgcccctgagaattatccgccgattggtgttgtttcattgtgtcgtccgtattgccgatttaatattgagcattgcgtaaaaaaaaatatcactggatacattatggtaccctcaacattttctcgtttgaaagccgcgcgttgtctgcctgttgttctggcagccctgattttcgccggttgtggcacccatactcccgatcagtccactgcttatatgcagggcacggcgcaggctgattctgccttttacctgcaacagatgcagcaaagttctgatgataccaggatcaactggcaattactcgccattcgtgcactggtgaaagaaggtaaaaccgggcaggcggttgagttgtttaaccaactaccgcaagaactgaatgatactcagcgtcgcgagaaaacactgctggcggcagagataaaactggcgcagaaagattttgctggcgcgcaaaacttgctggcgaaaatcacacctgccgatttagaacaaaaccagcaagcccgttactggcaggcaaaaatcgatgccagccaggggcgtccttccattgatttactgcgcgcgttaattgctcaggaaccgctgctcggtgcgaaagaaaagcagcagaatattgacgccacatggcaggcgctctcctccatgactcaggagcaggcgaatacgctggtgatcaacgccgacgaaaatattctgcaaggctggctggatttgcagcgcgtctggtttgataaccgtaacgatcctgacatgatgaaagctgggatcgccgactggcagaaacgttatccgaacaacccgggcgcgaaaatgctgccaacgcagttggttaacgtaaaagcgtttaaaccagcatcgaccaacaaaatcgccctgctgttgccgctgaatggccaggcagcggtatttggtcgcactattcagcaaggctttgaagcggcgaaaaatatcggcactcagccagtggtggcccaggtagcagccgcacctgccgcagacgtagcagaacaacctcagccgcaaaccgtggatggcgttgccagcccggcacaagcttcggttagcgatctgaccggtgaacagcctgcggcccagtcggtgcctgtaagcgccccggcgacaagcaccgcagcggtaagcgcacccgcaaatccatccgcagagctgaaaatctacgatacctcatcacaaccacttagccagatcttaagccaggttcagcaggatggcgcgagtattgtggtcggtccgttgctgaaaaataacgttgaagagttgctgaagagcaacactccgctgaacgtgctggcactgaaccagccggagaacatcgaaaaccgcgtcaatatttgttacttcgcgctttcaccggaagacgaagcgcgcgatgcagcgcgtcatattcgtgaccagggtaaacaagcgccgctggtgctgatcccacgcagttcattgggcgatcgcgtagccaatgcgtttgcgcaagagtggcagaaactgggcggcggcaccgttctgcaacaaaaatttggttccaccagcgagttacgcgcgggtgttaacggcggttcgggtatcgctttaacgggtagcccgattactcccagagaaacaaccgactccggcatgacgaccaacaatccaacgctgcaaaccacaccaaccgatgatcagttcaccaataatggcggtcgtgtcgatgcggtgtacattgtggcaacgccgggtgaaatcgcttttatcaaaccaatgatcgccatgcgtaacggtagccagagcggtgcaacgctgtacgccagctcccgcagtgcgcaagggaccgctggcccggatttccgcctggagatggaaggcttgcagtacagcgaaatcccgatgctggcaggcggtaatctgccgttaatgcagcaggcgctcagcgcggtgaacaacgattattcgctggctcgcatgtatgcgatgggcgtcgatgcctggtcgttggcaaatcatttctcacaaatgcgccaggttcagggttttgaaatcaacggtaataccggaagcctgacggcaaacccggattgcgtgattaacaggaagttatcatggctacagtaccaacaaggtcaggtagtccccgccagttaaccaccaaacagaccggcgatgcgtgggaagcacaagcgcgtcgctggctggaaggcaaaggactacggtttatcgccgctaacgtgaacgagcgtggcggcgagatcgatctgataatgcgtgaaggccggaccaccgtttttatcgaggtgcgttaccgccgctctgcgctttatggcggcgcggcagccagtgtgacccgcagcaaacaacacaaattattacagactgcccgcttgtggctcgcgcgtcataatgggagttttgatactgtggattgccggttcgatgtggtagccttcaccgggaatgaggttgagtggattaaggatgcctttaatgaccactcataattaaggtttaaggattagcgtgcaagaaagaattaaagcttgcttcactgaaagcattcaaactcaaattgcggcggcagaggcgcttccggatgccatctcccgtgcagccatgacgctggttcagtctctgctcaatggcaacaaaatcctctgttgtggtaatggaacttccgctgccaatgcacagcattttgctgccagcatgatcaaccgtttcgaaacggagcggcccagcttacctgccattgcactaaatactgataatgttgtcttaacggcaattgccaacgatcgcttacatgatgaagtgtatgcaaaacaggtgcgggcgctgggccatgcgggagatgtattgttagccatttccacccgtggcaacagccgcgatattgtaaaagcggtagaagctgccgttacgcgtgatatgaccattgtggcattaaccggctatgacggcggtgaacttgcaggtttgttagggccacaggatgtggagatccgcattccttcgcatcgtagtgctcgcattcaggaaatgcatatgctgacggtaaattgcctgtgcgatctgatcgataacacgcttttccctcaccaggatgtttaaggagaatacatgaaggcattatcgccaatcgcagtccttatttccgcgctgctgttgcaaggttgtgttgccgctgccgtagtgggtactgctgctgtgggtaccaaagccgcaactgacccacgcagtgtcggcacccaggtagacgatggtaccctggaagtgcgcgtgaacagcgcattgtcgaaagacgaacaaattaagaaagaagcgcgcattaatgtaacggcctatcagggcaaagtgctgctggttgggcagtcaccaaacgctgaactttcggctcgcgccaaacagattgctatgggcgtagacggtgccaacgaagtgtataacgagattcgtcagggccagccgattggtctgggcgaagcgtctaacgatacgtggatcaccaccaaagtacgttcgcagctgttaaccagcgacctggtgaaatcgtccaacgtgaaagtgaccaccgaaaacggtgaagtgttcctgatggggctggtgactgaacgtgaagcgaaagcggcggcagatattgccagccgggtaagcggcgtgaagcgggtaactacggcgtttacgtttattaaatagcagcccttgtaatgcctgatgcgacgcttgcagcgtcttatcaggcctacaacgatgcaaaccgtaggtcggataaggcgtttacgccgcatccgacatgttttccctcaaatcaaaccaacagcgccagcccgccgacaatcacaccagacactgccaccatcgcccccgtcagccataaggctttcgccggaaacgctttacgcaacataatcagtgacggcaaactcaccgccgggagcgtcatcaacaatgccagcgccggagcggttcccatacctgccagcatcatcgtttgtacaatcggaatttctgctgccgtgggaatgacaaacaagcatcccgctaccgccatcgccaccacccacatcaggctgttatcgacagcaccatcggcatgggggaataaccagacgcgagcggcacccaacaccagtactgcaaggatgtaaaccgggatcgtactccagaaaagcgtccatagcgccctgccccagcggctaaaaaaaccgccctgtgattccggtatgtcaatttcgaccggtgcctgcgtttgcggtgtttcacgcacccatttttgcaccagcgtcgcaatcagcaacaccatcaccagccccgccaccagacgaatcgccgcaaaaccccagccgaggacgaaccccataaacaccagcgtcgccgggtttaacaacggattccccatccagaatgccagcgcaccgcccatcgacacctgttggcgacgcattcccgccgcgaccggagccgcacagcaggtacacatcatgcccggcagagaaaacagcgttcccagcaacgtgccgcgaaagcgcgattgcccaagcgtacgcaacaaccagtcacgcgggatcagcacctgaatcaacgaaccgaggatcacccccagcaccgccgctttccataccgcgagaaaatagatcatcgcgtaatccaacgccgcctgccacggattagcatctgcctgcgcaaggatagatttaccgatactgtgggtttcggcagcagtaaacgctttgccgtagtaaggttgccatttcacataccagagaccggcaatgacaacgagaaagaaaagcgcgggtttccaccactgaatgggcgttgccgcctgagatgaagactgaccagtcatagcattccccaggaataagttatgataattgagcgcgtgaatattacgctcactatcatttcttgggaataattattcagctcttttgcgtaattctgaagagctcaaaatcgtcacgccttcatgctcaggccgcatcgcctctgccaacatgacccgcgccacgtctcgtgcatcaatggatttccagttacccggtagcaaacgaaaaagcggcgcaaaaagcgtttcattcattcgctgtttgcttcggtcacccagcagcattgacggacgagcaatggtcaatttcggccagttctgggcgattaatgcttcttccatctcccctttgacgcggttatagaaaaacggcgagtgggcattagcacccatagcactgaccaccagcatatgctgcgcaccgagccgccgcccggttaatgcggtatccaccaccaacgtgtaatcggcatgaataaacgcctctttgctccccgcttctcgccgcgtggtgccgagacaacaaaacacaatgtcgatgggatcggtgacctgcgccagcgcgtcagtcagttgcggatcatggggattaaacaccccgggcatatcgcccaacggacgtcgcgtcggcgcagcaatggcgttaactttcggttcattaatcaacatccgcagcaggtgaccgcccaccagccccgttgcgcctgtaattaaaacctggctcatattgcctccccccggtatgtgtactcatgtttaactataggttaccgttgccagaccagttttttaccaaagcccagcgtgttgtcggtgaatttgatttcatcgagccggatttcccataccggggccgacagcattctggcaaccggaaagcgacgattgtacgccttgcgtgcgaggtcgctttcctcgccttccagtctgcggatctcacctttaaactgcacgccgcgaattaacgctaccgttttcggctgaccgtttaccgttccggcaattgccgcctgcggcccgctcatctgcgcatgacgcgttttttcttccgtcaaaatgtagaaggcgactttctgcgcatcaaaaagataaaaggcattggcgcaccacagttccccttcctgctgcacacaccaggtgacaacatgttgttttgccagccaacggctgatggcggtgagtgtttccattgctgttctcttttatactgtgggcctgaccttaacatgcgacgcagacgatgacaccctggtttctttacttgatccgtaccgccgacaataagctttataccgggatcaccacggatgtcgaacgccgctatcagcagcaccaaagcggcaaaggggcgaaagcactgcgcgggaagggagaactaacgctggcgttttccgcaccagtgggcgatcgttcgctggcgttacgggcagaatatcgcgttaagcaactgaccaaacggcaaaaagagcgtctggtagcggaaggtgcagtgtttgcagaactgttgagcagcctgcaaaccccggagattaaaagcgattgaagtgctcgtgatactcaaccagaccagttacaccgttcagcgcgtcatccgctaaacgatgtacctggaaggcactttcagtgcccggccagcggcaacgcagatcgtgatgtgccgccagttcaaagccgaaacggctgtacagcgccggatcgcccagcgtcaccactgcggcatagccgaactcattaagcgaatcgagtccttcatagaccagttggcgtgccagcccctgtccacggtatttttcatctaccgccagcggtgccatgccgacccattgcaggtcttcgccctgcacatcaaccggactaaatgccacatagccaatgacctgaccttcgtcatctgtcgccaccagccccagcgtcagaaagccatcttcacgcagatcgtgaaccagcttcgcttccgcatcactttcgaatgaacgacgcagcagggcatcaatacccggcgcatcaatgggaatttctactcgaattagcatggttcacctaccgatgtctgtttggtttcaggcgcggttttcattcccgcctcaacaaaatccgccagttgcagcagcatcatgcgtaaggctttcggcatttgctccagttcaatggcgtccatcaggtttttcacatacagccccagctccgtatcgccttcaatcaccagccgacgctggaagaagagcgtatccggatcttgtttacgcgccgcaatcatcagcagatcgctggcgtcggcactaaaactcacatcagcttgcgcgttctggctaacgaccagtttgccattcaccaccgaggtaaaccattgcaggtcaatatcacgcacatgaatacttaaccagcgaccttcaagaaactccagctcgccatcatccagcgcctgacggaattgccagcttaagacctgctcaagaacctggcgttttagcgcaaatggcgtcagttttaccggtacactcaacagagatggccccaaatgcacaatacgggaacgcagtttatccaacacgagttttactccctgtttcaacaatcatcctattttgccatatcagaaaaataacatagcggtataaatcaacaattccatatgaaattgctgctaccaccaatacaactttaactgccttaaatcaaaaattgtcgcagcaaggttaactaaaatcccagttcgttaacatttttgcgttttgatagcgcaaccttcaggaaaaattatggagctgctctgccctgccggaaatctcccggcgcttaaggcggccatcgaaaacggcgcagatgctgtttatatcgggctaaaagatgataccaatgcccgtcacttcgccggccttaactttaccgagaaaaaattgcaggaagcggtgagttttgtccatcaacatcgccgcaaacttcacatcgcgattaacacttttgcgcatccggacggttacgcccgttggcagcgcgccgtggatatggcggcgcaactgggtgccgacgcgctgatactcgccgacctcgccatgctggagtacgccgccgagcgttatccgcatattgagcgccacgtatcggtgcaggcttcggcgaccaatgaagaggcgattaacttttatcatcgccattttgacgttgcccgcgtggtgctgccgcgcgtgttgtcgattcatcaggtgaaacaactggcacgggtcacacctgtaccactggaagtctttgctttcggcagcctgtgcattatgtcggaaggtcgttgctatctgtcgtcgtatttgacgggtgagtcgcccaacaccgtgggcgcgtgttctccggcccgtttcgtgcgctggcaacaaacgccgcaggggctggaatcccgcctgaacgaagtgctgatcgaccgttatcaggacggcgaaaacgcaggttatccgacgctatgtaaagggcgttatctggtgaacggcgagcgctatcatgcgctggaagaaccaaccagtctcaatacccttgagctactgccggagttaatggcggcgaatatcgcttcggtgaaaattgaaggccgccagcgtagccctgcgtatgtcagccaggtagcgaaagtctggcgtcaggctatcgaccgttgtaaggccgatccgcaaaacttcgtgccgcaaagcgcgtggatggagacgctcgggtcgatgtccgaaggcacgcagaccacccttggcgcatatcaccgtaaatggcagtgagaaaagcaatgaaatattccttagggccagtgctgtggtactggccaaaagagacgctggaagaattttatcagcaggccgccgccagcagcgccgacgtgatttatcttggtgaagcggtatgcagcaagcgccgggcaaccaaagttggcgactggctggagatggcaaaatcactcgccggaagtggcaagcagattgtgctctccacgctggcgctggtgcaagcatcctccgaactgggcgaactgaaacgctatgttgagaacggtgagtttctgattgaagccagcgatctcggcgtggtgaatatgtgcgctgaacgcaaactgccgttcgtcgccgggcacgcgctgaactgctacaacgcggtgacgctgaaaatattgctcaaacagggcatgatgcgctggtgtatgccggtggagctttcccgcgactggctggtgaatctgcttaatcagtgcgatgagctgggcattcgtaaccagtttgaagtggaagtcttgagctacggtcatctgccgctggcctactctgctcgctgctttaccgcgcgttcggaagaccgcccgaaagatgagtgtgaaacctgctgcattaagtatccgaacgggcgcaacgtgctgtcgcaggaaaaccaacaagtgtttgtgctcaatggcattcagaccatgagcggctacgtgtacaacctcggtaacgagctggcatccatgcaggggctggttgatgtggtccgcctgtcaccgcagggtactgacactttcgcgatgctcgacgccttccgcgctaatgaaaatggcgctgcaccactcccgttgacggcaaacagcgactgtaacggctactggcgacggctggctgggctggaactgcaagcctaagcaaatagctcactttgttaacaactttaactaccctttaatgcagtattaaagattaatcggtaacaaagtgagctgttatgactgataaaaccattgcgttttcactactcgatctggcccccatccccgaaggttcttcagcgcgggaagcgttctcccactctctcgatctcgcccgtctggctgaaaagcgcggctatcatcgctactggctggcggaacaccacaatatgactggcattgccagtgctgcaacatcagtattgattggctatctggcggcaaataccaccacgctgcatctggggtctggcggcgtgatgttaccaaaccactcaccgttggtgattgccgaacagttcggcacgctcaatacgctctatccggggcgaatcgatttggggctgggtcgtgcgccaggtagtgaccaacggacaatgatggcactacgtcgccatatgagcggcgatattgataatttcccccgcgatgtcgcggagctggtggactggtttgacgcccgtgatcccaatccgcatgtgcgccctgtaccgggctatggcgagaaaatccccgtgtggttattaggctccagcctttacagtgcacaactggcggcgcagcttggtctgccgtttgcgtttgcctcacacttcgcgccggatatgttgttccaggcgctgcatctttatcgcagcaacttcaaaccgtcggcacggttggagaaaccgtatgcgatggtgtgcatcaatattatcgccgccgacagcaaccgcgatgccgaattcctgtttacctcaatgcagcaagcctttgtgaagctgcgccgcggcgaaaccgggcaactgccgccaccgattcaaaatatggatcagttctggtcgccgtccgaacagtatggtgtgcagcaggcgctgagtatgtcgctggtgggcgataaagcgaaagtgcgtcatggcttgcagtcgatcctgcgcgaaaccgacgccgatgagattatggttaacgggcagattttcgaccaccaggcgcgcctgcattcgtttgaactggcgatggatgtgaaggaagaattattggggtagtgtgttttaacgtaggaagccttatccgagatggcaacgctgccctacacaatgcctgataagcgaagcgcatcaggcattgtgtaggcagcagaaatgtcggataaggcaccgctgattactgatacaccggcagcaaattaaagctcgataaaatatgcaccagtgcgttgccaacgccaaacaccagaatcagcgcaatcatcggcttgccgccccagacgcggaatttcgggctgccaaagcgtttacgcgatgcgcgggccaacagcgccggtacaattgccgcccagatagtagctgctaagccagcataaccaatggcgtacaggaatccgttaggaaacagcaggccacccacaacaggcggggcaaaggtcagcaacgctgttttcaaacggcccatagccgagtcgtcaaaaccaaacagatctgccagatagtcaaacaaacccagcgttacgccaaggaacgaactcgctaccgcaaagtttgagaacacgaccagtagaaggtccagactacggctgttcagtacgccgcttaacgcctgtaccagcacatcaatattaccgcccttctcggcgatgccgataaactccggacgcgggatgttacccatcgtcgccagcaaccagatggtatacagcgccagcgccatcagcgtaccgtacaccaggcatttcacgatggttttcggatctttgccgtaatacttcatcaggctcggtacgttaccgtgataaccaaacgatgccagacagaacggcagcgtcatcaacagatacggtgcataagacgcattgctttcggcgacgttgaacaatgtcgcaggctgcacatgccccagcaggctaccgaaggtgaggaagaaggtaatgactttcgcccccagcacaatcgctgtcatgcgactgacggctttggtgctcaaccacaccacaaacgctaccaacagtgcaaaaccaaaacccgctgcccgtgccgggacgtttagcgacatctctgcgaaggtgtgatgcagaatcgaaccgctggcagaaatataggcgtaagtcaggatatagagcacaaaggcaatggaaatgccgttgactacgttccagcctttgcccagcaaatctttggtgatggtgtcaaagctagaaccgattcgataattcaggttagcttccagaatcatcaagccggaatgcagcatacagaaccaggtaaagatcagcgccgccattgaccagaagaaccacgccccggacatgaccacaggcagagaaaacatccctgcgccaataatggtgccgccgataatcaccacgccgccaagcagcgacggtgacgtttgggtggtggttagtgttgccatgagggcttctctccagtgaaaaatagtgcgactgtgttgttatgcattgcactgtaccagtacatgagtacaaaaaacagaaaaaaagccccgatggttaaaatcggggctgtatatattattttacagattgtgttcgctgttcagcgatgattacgcatcaccaccgaaacgacgacgaccggtagagtcatcacgacgcggtgcgcggccttcacgacgttcgccgctaaaacgacgcccatcaccacgccccccttcacggcgttcaccgctgaagttacgaccgccttcacgacgttcgccaccgaaaccacgaccaccgccacgacgctcaccgccagtatgcggctgtgcatcgcccagtaactgcatgttcatcggcttgttgagaatgcgagtacgcgtaaagtgttgcagcacttcacccggcatacctttcggcagttcgatggtggagtgagaagcaaacagcttgatgttaccgatgtaacggctgctgatgtcgccttcgttagcaatcgcaccaacgatatgacgaacttcaacaccatcatcgcggcccacttcaatacggtacaactgcatatcgccaacatcacgacgttcgcgacgcggacgatcttcacggtcgccacgcgggccacggtcgttacgatcgcgcggaccacggtcatcacggtcacggaattcacgtttcggacgcatcggcgcatctggcggaacaatcagagtacgttcaccctgtgccattttcagtagtgcggctgccagagtttcgagatccagctcttcaccttcggcagtcggctgaattttgctcagcagtgcacggtattgatccagatcgctgctttccagctgctgctgtactttagcggcaaatttttccagacgacgtttgcccagcagttctgcgttcggcagttctacttccggaatggtcagcttcatggtgcgttcaatgttacgcagcagacgacgctcacggttctcaacgaacagcagtgcacgaccagcacgacctgcacgaccggtacgaccgatacggtgaacgtaagactcagaatccatcgggatatcgtagttaaccaccaggctgatacgctcaacgtccaggccacgggctgcaacgtcggtcgcaatcaggatgtccagacgaccatctttcaggcgttccagtgtctgctcacgcagcgcctggttcatgtcaccgttcagcgcggcgctgttgtagccgttacgctcaagagcttctgccacttccagagtcgcgtttttggtacgaacgaagataatcgccgcatcaaaatcttccgcttccaggaaacgtaccagtgcttcgtttttacgcataccccagacagtccagtagctctggctgatgtcaggacgggtagtcacgctggactgaatgcgcacttcctgcggctctttcataaagcggcgggtaatgcgacgaatcgcttccggcatggttgcagagaacagagcggtctgatgaccttccgggatctgcgccataatggtttcaacgtcttcgatgaagcccatgcgcagcatttcgtcagcttcatccagaaccagaccgctcagtttagagaggtccagagtgccacgtttcaggtggtccagcagacggcccggagtaccgacaacgatctgcggcccctgacgcagggcgcgtaattgcacgtcataacgttggccgccgtacagggcaaccacgtttacgccgcgcatgtgtttagagaaatccgtcattgcttcagcaacctgtaccgccagttcgcgggtcggtgccagcaccagaatctgtggtgctttcagctcaggatcaagattctgcagcagaggtagagagaatgctgcagtttttccgctccccgtctgggccatacccagaacgtcgcggccattcagcagatgtggaatacactctgcctgaattggagatggtttttcgtaacccagatcgttaagggcttcaaggataggagccttcaggcccagatctgcaaaagtggtttcgaattcagccatgtagtacgtgtgcctcaaaattaatggcggccagtctacataactcatcatgaaattgatcagcaattttcattgaaaagtgtgaaccggctcaaagtaggtgtattaacgaacaacaacgccctcacccgttaaggtgatggcaatcaaaaaagattacgggctgatgtgtacgtcagctattgctggtccgattctgccaggtcatcttggtcctggcccaggagcgataattccaacaatgcgtatcggtgctcaacaaagttatgaacgttgttggcaaccgccagtttgaacagtgccgtggcgctgtccaaatcccccagacttaggtagtacttacctaaatagaagttggtttcactgagatgctcagcgagcgaggtgttatccgttgcgtccgccttgagcctttccattaacgtttgttcgctaatgttgcccaggtagaactcgacaatgttccatccccactgttccttatccgatttttcgaagtgctgtttcaacacttctttagcctgcttctcatcgagcttctgctcggcgagataaagccacagactacggaaaggatcattgggatcgtcttgataaaacgccagcagatcatcttgcgctaacttgtcacgaccgccgtaatataatgcgatcccgcgattcaagtgcgcgtagttgtaagttggatcaagctcaagtacagaatcaaacgcttcataggcagcatcaaaattgcctgcctgcgttaaatatatgcctaagtaattgaatacttcaggcatatccggtcggattgccagcgcttgcgaaaaatcgttacgcgctaatgccctcagaccgagactatcatacaacactccgcgctcatataaaagctgtgcgcgttcgtcatcggttaaagcccgactggcaaggatctgttccatacgtgccagaatcacttcctgctgtaaagtcggttgcaatggtaccgcgaggacttcacttttacgccaggaagtattactgcatcctgcaagcgtaagtgctgtcgcaacgaaacaccagcgcaaaaaaggcttcatttcccactcccgaagaccacggttgaatgaacgtcctgttcccggttgctaacaaggcgtcctgcccggttaaaagccccccgccgcagcggagggcaaatggcaaccttactcgccctgttcagcagccggagcttccggtgctgcagcaggttgagattgctcagtcgcttctttaatgctcagacggatacggccctggcgatcaacttccagaactttcaccggtacttcctgacccatctgcaggtaatcggtcactttctcaacgcgtttatcagcgatttgagagatgtggaccagaccttctttaccgccaccaatggcaacaaatgcgccaaaatcaacgatacgggtcactttaccattgtagacgcggcccacttcgatttctgcagtgatctcttcgatacgacgaatcgcgtgtttcgctttctcgccgtcggtcgctgcaatcttcacagtaccgtcatcttcaatttcgatggtggtgccggtttcttcggtcagagcacggattacagaaccgcctttaccgataacatctttgatcttgtccgggttgatcttgatggtatggatacgcggtgcgaactcagagatatcgccacgcggcgcgttgatcgcctgttccattacccccaggatatgcagacgcgcacctttagcctggttcagtgcaacctgcatgatctctttggtgataccttcaattttgatatccatctgcaatgcagagataccgtcacgggaacccgcaactttgaagtccatatcgcccaggtgatcttcgtcgcccaaaatgtcagacagtacaacgtagttgtcgccttctttcaccagacccattgcgatacccgcaacggcagctttgattggcacacctgcgtccatcagcgccagagacgcgccgcacacggaagccatagaagaggaaccgttggattcggtaatttcagacacaacacgtacggtgtacgggaatttgtccatatccggcattactgccagcacgccgcgcttcgccagacgaccgtgaccaatttcacgacgcttcggagaaccgaccatgccggtttcgcctacggagtacggagggaagttgtagtggaacaggaaggtatcggtacgttcgcccatcagttcatcaagaacctgcgcgtcacgagcagtacccagcgttgcggtaaccagcgcctgcgtttcaccacgggtgaacagcgcagaaccgtgagtacgcggcagcacaccagtacgcacatccagaccacggatcatatctttttcacgaccgtcgatacgcggttcgcctgccagtacgcggctacgaacaacatttttctcgatagcgtgcagaatttcacccagttcgttttcgtccagggtttcgtcttcagcaagcagtgtcgcgatggtttcagatttgatgacatcaacctgcgcataacgctcttgtttgtcggtgatgcggtaagcatcgctcagacgagcttcagccagcgcagcaacgcgcgcgttcagcgcttcgtttaccggctccggctgccaatcccaacgcggtttaccggcttctttcaccagttcattgatgttctgaataacaacctgctgttgttcatgaccgaacaccactgcgcccagcatttggtcttcgctcagcagttcagcttcagattcaaccatcagcacggcagcttctgtaccggcaacaaccaggtccagtttgctctctttcagttcgtcctgagtcgggttcagtacgtactggtcattgatgtaacctacacgggcagcaccaatcgggccattgaacggaataccagacagagacagtgctgcggaagcaccaatcatcgcgacgatatccgggttaacctgcgggttaacagaaaccacggtggcgataacctgaacttcgttgacgaagccttccgggaacagcgggcgaatcgggcggtcaatcagacgcgcgatcagggtttcgccttcgcttgggcggccttcacgacggaagaagctacccgggatacgaccagcagcgtaggtacgctcctgatagttaacggtcagcgggaagaagtcctgacctggtttggcttttttctgaccaacaacggtaacaaataccgcggtgtcatccatgctaaccataacagcggcagtagcctgacgagccatcatgccggtttccagagtcacggtgtgttggccgtactggaatttacgaacgatcggattaagcaatgtaatatcctttctctttcttagacagtaccttacggtactggtgttaatacccgatcttctgcgcatcctcgcgactaatgacaaccctaacccagctctatgtgggtaaagcctctcattagccgcgcgaacctctgcaacggaagatcattcatagcaacaatacattagtttccagtgaattgctgccgtcagcttgaaaaaaggggccactcaggcccccttttctgaaactcgcaagaattagcgacgcagacccaggcgctcgatgagctgggtgtaacgtgctacgtctttacgtttcaggtagtcgagcagtttacgacgctgagaaaccatgcgcagcagaccacgacggctgtggtgatcttttttgtgctctgcaaagtggccctgcaggtggttgatctgtgcagtcagcagtgctacctgaacttcggtagaaccggtgtcgtttgcgtcacgaccaaactcagaaacgattttagctgttgcttcagtacttagagacattttaaaactccaaagtatatagaatgaaaggacgccgatctctaattcagcgatcccagtgtacgttacgcaaagtgttaaacaatttacgcgacgttaagcggcagtattctactcgtagcgacctgttatcgcaagacggttaacattacgccgggtattcaaccaccaggcgacgaggcgcaacgcggccttcatcgtcaatttcgcccataccgataaacttgccgttctcaccctctgtaacgcgaaccagtccttccagcggcgcaccggatgtacgaactgggttaccatttttgaagtaaacagaagacgttaacggaagattcaccaccgggtagtccgaagctggactgtccattggcatcagtaatggatcaagtaactccgcagccggaatatcctgctgttcggcttgctcaaccagttcacgcagatgttccagggtcaccatccgttcaaccggatatttacttaccgccagacgacgcaagtaaataacatgcgcgccacaaccgagtttttcgccgagatcgtcaatgatagtgcggatataagtgccttttgagcagtgaatttccagctccagctcattgccttcatggcgaataaacagcaattcataaacggtaatcgggcgcgcttcacgtggaacttcaatgccctgacgcgcgtattcgtacagttttttgccctgatatttcagtgctgaatacatcgaagggatctgttcgatatcgccacggaaggtatccagcgccgccgccagttgctctgcactaaaggttaccggacgttcttcaacgatttgtccgtcggcatcagaagtatcggtacgctgcccaagacgcgcaatgacccgatagcgtttgtcggagtccagcagatactgggaaaacttcgtcgcttccccgaggcaaattggcaacatgccggtcgccagcgggtccagcgcaccggtatgcccggcacggttggcgttataaatccgtttcactttttgcagcgcatcgttgctggacatcccctgcggtttatccagcaacaaaacgccgttaatgtcgcgaccgcgacgacgaggacgactcattagtcctccttgctgtcgtccgggttaacacgacgttcttcgtcatgtttgaccacgctggtcaccaggtttgacatgcgcatcccttcaaccagagagttgtcgtagaagaaggtcagttccggcacgatacgcaggcgcatcgctttccccagcaggctgcggatgaaaccagaagcttcctgcaacgctttgatgcccgctttaaccgcgtcttcatctttgtcgttgaggaacgtcacatatactttggcatacgccaggtcgcgagacatttcgacaccggaaacggtggtcatcatgcccagacgaggatctttaatttcacgctgcaggatgagagcgatctctttttgcatttcctgcgctacgcgctgcgggcgaccaaattctttcgccataataaattctcctgacaaaaaaggggctgttagcccctttttaaaattaatttcaggtggaagggctgttcacgttggcctgataagacgcgccagcgtcgcatcaggcaatccatgcaggatgcgacataaacgccttatcccgcatggaaccctaaaaaccttaagcgatagtacgttggatctcgatgatttcgaatacttcgatcacatcgccagtgcggacatcgttgtagttcttaacgccgataccacattccataccgttacggacttcgttaacgtcatctttgaagcgtcgcagggactccagctcgccttcgtagataaccacgttgtcgcgcagaacgcggatcgggttgtgacgtttaaccacaccttcggtaaccatacaacctgcgatagcaccaaatttcggtgatttgaacacgtcacgaacttccgccagaccgataatctgctgtttcagttccggagacagcataccgctcatcgccgctttcacttcgtcgatcaggttatagatgacggagtagtaacgcagatccaggctttccgcttcaatcactttacgtgcagaggcatcagcacgtacgttgaagccaaccaggatggcgttggacgccgcagccagggtagcgtcggtttcggtgataccacctacgccagaaccgatgatcttcactttaacttcgtcagtagacagtttcagcaaggagtcggaaattgcttccacagaaccctgtacgtctgccttcaggacaatattcacttcgtgaacttcgccttcggtcatgttggcgaacatgttctcgagtttagatttctgctgacgcgccagtttaacttcgcggaatttaccctgacgatagagtgcaacttcacgcgctttcttctcgtcacgtacaacggtaacttcatcacccgcagccggtacgccggacaggccaaggatttccaccggaatggacggacccgcttccagcacttcctgacccagttcgttacgcattgcacgaacacgaccgtattcgaagccacacagaacgatatcgcccttgtgcagagtaccttcacgtaccagaacggtagcaaccggaccacgacctttatcgaggaaggattcgataaccgcaccgctcgccatacctttacgtaccgctttcagctccagaacttccgcctgcagcaggatagcatccagcagttcatcaataccggtacccgcttttgcagatacgtgtacgaactggctttcgccgccccactcttctggcaggatgccgtactgggagagttcgttcttaacgcgatccggatcggcttctggtttatcgattttgttcacagcaaccaccaccggaacacccgccgctttcgcgtgctggatagcttcgatggtctgcggcattacaccgtcgtctgcagcaacaaccaggactacgatgtccgttgcctgcgcaccacgtgcacgcattgaagtaaacgcggcgtgccccggggtgtccaggaaggtgatcatgccgttttcagtttcaacgtggtatgcaccaatgtgctgggtaatgccgcccgcttcgccagaggccactttcgttgaacgaatgtagtccagcagagaggttttaccgtggtcaacgtgacccatgatggtcacaaccggcgcgcgcggttcagccgcagcacccgtgtcacggtcgctcattaccgcctcttccagctcgttttcacgacgcaggataactttgtggcccatctcttcagcaaccagctgtgcggtttcctgatcgataacctggttgatggttgccattgcgcccagtttcatcatcgctttgatgacctgagagcctttaaccgccatcttgttcgccagttcgccaacggtgatggtttcgccgatcacaacgtcacggttaacggcctgagctggcttctggaagccttgctgcagcgaagaacctttacgttttccgcccttaccgccacgtactgctgcgcgagcttcttcacgatcagcttttgattcagcgtgtttgttgcccttcttcggacgcgctgctttcgcgttacgaccacggccacggccgccttcgacttcacgatcgctttcgtcttctgcctggcgagcatgttgagaagtagtgacgtgataatcgctggaatcttcagtcggttccgcgttatcagtccatttgttttcttccgccatacgacgtgcttcttcagcaacgcgacgtgcttcttcttcgagtttacgacgcgcttcttcttcggctttacgcttgagctctgcagcttcctgctcacggcgggctttttcagcctgggcgtttttagtcatatcgtcttgttgattgctcactttgtctttttccgcagcttcacgtttcgcttgttcagcagcttcacgcttagcctgttctgcggcctcacgttcagctttttgttgcgcctcgcgtttagccgattcttctgcctcacgacgggcttgctcttccgcttcacgctgcgcttgctcttccgctgcaaggcgctcagcctcttgcggatcgcgtttcacaaaggtgcgtttcttgcggacttcgatttgtaccgatttgctttttccaccggtaccaggaatgttaagggtgctgcgtgttttacgttgcagcgtcaatttgtccgggcctgaatttttctgattcaggtggtcaatcaaagtctgtttctcttgtgcagacacagagtcgtcagcagacttccggatacctgcatcagcaaattgctgtaccaggcgttccacggaggtctgtcgctctgcggccagcgttttaatcgttacatctgtcatgctgttccttcctgctacagtttattacgcttcgtcaccgaaccagcaaatattacgggcagccataatcaatgctccggctttttcgtcggtcaacccttcgatatcagccagatcatcaatgccctgttcggcgagatcttccagcgtacaaacgccacgggcggccagtttgaatgccaaatcacgatctaccccttcaaggttcagcagatcatcagccggtttgttatcaccgaggctttcttcctgggcctgtgcaatggtggccagtgcatttttagcacgctcgcgcagtgcttcaacggtcggctcatcaaggccttcgatttccaacagctctttcatcggcacataggccagttcttccagcgtcgagaagccttcttctaccagaacagtcgcgaagtcttcatcgatgtcgagatatttggtgaaggtgtcgatcgctgcgtgcgcttccgcctgatgcttagcctgcaggtcgtcaacggtcatcacgttgagttcccaaccgctcagctgcgaagccagacgcacgttctgaccgttacggccaatcgcctgcgccaggttaccggcttcaacggcgatatccatggtgtgtttatcttcatccaccacgatagaagcaacgtctgctggtgccattgcgttaatcacaaactgcgccgggttatcatcccacaggacaatatcgatacgctcgccgcccagttcagtagaaaccgcctgaacacgcgcgccacgcatacctacgcaagcacctaccggatcgatacgtttatcgttggttttcaccgcaattttcgcacgagatcccgggtcgcgagccgctgctttaatttcaatcacttcttcgccgatttccggcacttcaatacggaacagttcgatcagcatttccggcttggagcgggtgacgaacagctgcgcgccacgcgcttccgggcgaacggaatagagcacgccacgaacgcggtcaccagggcggaagttttcacgcggcagcatatcttcgcgcaggatcacggcttcagcgttgttgcccagatccagagagatgttgtcgcggtttacttttttcaccacgccggtgatgatttcaccttcgtgttcacggaactgatcaaccaccatcgcacgttcggcttcacgcactttctgcacgataacctgttttgccgtctgggtagtgatacggtcaaaggtaacagactcaatctgatcttcaacgtaatcgcccaggttcaggctttcatcttcataacgtgcggcttcaagggtgatttccttggtcggctgggtgacttcatcaacaactaaccagcgacggaaggtgtcaaaatcaccgcttttgcgatcgatctgtacgcgaacgtcgatttcttgttcatattttttctttgttgctgtcgccagcgcgctttccaatgcttcgaaaatcttctcgcgaggtagcgccttttcattggatacggcttcaactacagccaaaatttctttgttcatcgcgggcttttcacctcatccagactattaaaagtggggaaccaggttcgccttctggatattactcagcgcgaacacttcatctttaccttcgacggtaactgtgatcatttcaccgtctaccgctttgataacgccctgccatttacgacggttttgtaccgccatacggagaaccagagtcacctcttctccgacaaaacgggcgtagtgttcagccgtgaacagtgggcgatcgagacccggtgaggagacttccaggttataagcaacggtgatggggtcttcaacatccagcacagcacttacctggtggctcacatcagcacaatcatcaacattgatgccatcttcactatcaatatagatgcgcagtgtggatgtgcgaccgcgaataaattcgatgccaaccagttcaaaacccagggcctcaactggcgcagtaatcatctctgttaatttttgctctaatgtggacaagcccacccccaagacataaaaaaagggcctaaagcccagttattctgtagtcagataacaaaaaaccccgataaatcggggctttatataactgaaccctataaccgcaactgcggtctggagcactttccagaaggattttttcaaatcccactacgaaggccgaagtcttcacagtatatttgaaaaaggactctaagggaaagtggttgcgggggccggatttgaaccgacgaccttcgggttatgagcccgacgagctaccaggctgctccaccccgcgcctgaaacgtggcaaattctactcgttttgggtaaaaaatgcaaatactgctgggatttggtgtaccgagacgggacgtaaaatctgcaggcattatagtgatccacgccacattttgtcaacgtttattgctaatcacgtgaatgaatatccagttcactttcatttgttgaatacttttaccttctcctgctttcccttaagcgcattattttacaaaaaacacactaaactcttcctgtctccgataaaagatgattaaatgaaaactcatttattttgcataaaaattcagtgaaagcagaaatccaggctcatcatcagttaattaagcagggtgttattttatgacgacgattctcaagcatctcccggtaggtcaacgtattggtatcgctttttccggcggtctggacaccagtgccgcactgctgtggatgcgacaaaagggagcggttccttatgcatatactgcaaacctgggccagccagacgaagaggattatgatgcgatccctcgtcgtgccatggaatacggcgcggagaacgcacgtctgatcgactgccgcaaacaactggtggccgaaggtattgccgctattcagtgtggcgcatttcataacaccactggtggactgacctatttcaacacgacgccgctgggccgcgccgtgaccggcaccatgctggttgctgctatgaaagaagatggcgtgaatatctggggtgacggcagcacctataaaggaaacgatatcgaacgtttctaccgttacggtctgctgaccaatgctgaactgcagatttacaaaccgtggcttgatactgactttattgatgaactgggtggccgtcatgagatgtctgaatttatgattgcctgcggtttcgactacaaaatgtctgtcgaaaaagcttactccacggactccaacatgcttggtgcaacgcatgaagcgaaggatctggaatacctcaactccagcgtcaaaatcgtcaacccaattatgggcgtgaagttttgggatgagagcgtgaaaatcccggcagaagaagtcacagtacgctttgagcaaggtcatccggtggcgctgaacggtaaaacctttagcgacgacgtagaaatgatgctggaagctaaccgcatcggcggtcgtcacggcctgggcatgagcgaccagattgaaaaccgtannnnnnnnnnnnnnnnnnnnnnnnnnnnnnnnnnnnnnnnnnnnnnnnnnnnnnnnnnnnnnnnnnnnnnnnnnnnnnnnnnnnnnnnnnnnnnnnnnnnnnnnnnnnnnnnnnnnnnnnnnnnnnnnnnnnnnnnnnnnnnnnnnnnnnnnnnnnnnnnnnnnnnnnnnnnnnnnnnnnnnnnnnnnnnnnnnnnnnnnnnnnnnnnnnnnnnnnnnnnnnnnnnnnnnnnnnnnnnnnnnnnnnnnnnnnnnnnnnnnnnnnnnnnnnnnnnnnnnnnnnnnnnnnnnnnnnnnnnnnnnnnnnnnnnnnnnnnnnnnnnnnnnnnnnnnnnnnnnnnnnnnnnnnnnnnnnnnnnnnnnnnnnnnnnnnnnnnnnnnnnnnnnnnnnnnnnnnnnnnnnnnnnnnnnnnnnnnnnnnnnnnnnnnnnnnnnnnnnnnnnnnnnnnnnnnnnnnnnnnnnnnnnnnnnnnnnnnnnnnnnnnnnnnnnnnnnnnnnnnnnnnnnnnnnnnnnnnnnnnnnnnnnnnnnnnnnnnnnnnnnnnnnnnnnnnnnnnnnnnnnnnnnnnnnnnnnnnnnnnnnnnnnnnnnnnnnnnnnnnnnnnnnnnnnnnnnnnnnnnnnnnnnnnnnnnnnnnnnnnnnnnnnnnnnnnnnnnnnnnnnnnnnnnnnnnnnnnnnnnnnnnnnnnnnnnnnnnnnnnnnnnnnnnnnnnnnnnnnnnnnnnnnnnnnnnnnnnnnnnnnnnnnnnnnnnnnnnnnnnnnnnnnnnnnnnnnnnnnnnnnnnnnnnnnnnnnnnnnnnnnnnnnnnnnnnnnnnnnnnnnnnnnnnnnnnnnnnnnnnnnnnnnnnnnnnnnnnnnnnnnnnnnnnnnnnnnnnnnnnnnnnnnnnnnnnnnnnnnnnnnnnnnnnnnnnnnnnnnnnnnnnnnnnnnnnnnnnnnnnnnnnnnnnnnnnnnnnnnnnnnnnnnnnnnnnnnnnnnnnnnnnnnnnnnnnnnnnnnnnnnnnnnnnnnnnnnnnnnnnnnnnnnnnnnnnnnnnnnnnnnnnnnnnnnnnnnnnnnnnnnnnnnnnnnnnnnnnnnnnnnnnnnnnnnnnnnnnnnnnnnnnnnnnnnnnnnnnnnnnnnnnnnnnnnnnnnnnnnnnnnnnnnnnnnnnnnnnnnnnnnnnnnnnnnnnnnnnnnnnnnnnnnnnnnnnnnnnnnnnnnnnnnnnnnnnnnnnnnnnnnnnnnnnnnnnnnnnnnnnnnnnnnnnnnnnnnnnnnnnnnnnnnnnnnnnnnnnnnnnnnnnnnnnnnnnnnnnnnnnnnnnnnnnnnnnnnnnnnnnnnnnnnnnnnnnnnnnnnnnnnnnnnnnnnnnnnnnnnnnnnnnnnnnnnnnnnnnnnnnnnnnnnnnnnnnnnnnnnnnnnnnnnnnnnnnnnnnnnnnnnnnnnnnnnnnnnnnnnnnnnnnnnnnnnnnnnnnnnnnnnnnnnnnnnnnnnnnnnnnnnnnnnnnnnnnnnnnnnnnnnnnnnnnnnnnnnnnnnnnnnnnnnnnnnnnnnnnnnnnnnnnnnnnnnnnnnnnnnnnnnnnnnnnnnnnnnnnnnnnnnnnnnnnnnnnnnnnnnnnnnnnnnnnnnnnnnnnnnnnnnnnnnnnnnnnnnnnnnnnnnnnnnnnnnnnnnnnnnnnnnnnnnnnnnnnnnnnnnnnnnnnnnnnnnnnnnnnnnnnnnnnnnnnnnnnnnnnnnnnnnnnnnnnnnnnnnnnnnnnnnnnnnnnnnnnnnnnnnnnnnnnnnnnnnnnnnnnnnnnnnnnnnnnnnnnnnnnnnnnnnnnnnnnnnnnnnnnnnnnnnnnnnnnnnnnnnnnnnnnnnnnnnnnnnnnnnnnnnnnnnnnnnnnnnnnnnnnnnnnnnnnnnnnnnnnnnnnnnnnnnnnnnnnnnnnnnnnnnnnnnnnnnnnnnnnnnnnnnnnnnnnnnnnnnnnnnnnnnnnnnnnnnnnnnnnnnnnnnnnnnnnnnnnnnnnnnnnnnnnnnnnnnnnnnnnnnnnnnnnnnnnnnnnnnnnnnnnnnnnnnnnnnnnnnnnnnnnnnnnnnnnnnnnnnnnnnnnnnnnnnnnnnnnnnnnnnnnnnnnnnnnnnnnnnnnnnnnnnnnnnnnnnnnnnnnnnnnnnnnnnnnnnnnnnnnnnnnnnnnnnnnnnnnnnnnnnnnnnnnnnnnnnnnnnnnnnnnnnnnnnnnnnnnnnnnnnnnnnnnnnnnnnnnnnnnnnnnnnnnnnnnnnnnnnnnnnnnnnnnnnnnnnnnnnnnnnnnnnnnnnnnnnnnnnnnnnnnnnnnnnnnnnnnnnnnnnnnnnnnnnnnnnnnnnnnnnnnnnnnnnnnnnnnnnnnnnnnnnnnnnnnnnnnnnnnnnnnnnnnnnnnnnnnnnnnnnnnnnnnnnnnnnnnnnnnnnnnnnnnnnnnnnnnnnnnnnnnnnnnnnnnnnnnnnnnnnnnnnnnnnnnnnnnnnnnnnnnnnnnnnnnnnnnnnnnnnnnnnnnnnnnnnnnnnnnnnnnnnnnnnnnnnnnnnnnnnnnnnnnnnnnnnnnnnnnnnnnnnnnnnnnnnnnnnnnnnnnnnnnnnnnnnnnnnnnnnnnnnnnnnnnnnnnnnnnnnnnnnnnnnnnnnnnnnnnnnnnnnnnnnnnnnnnnnnnnnnnnnnnnnnnnnnnnnnnnnnnnnnnnnnnnnnnnnnnnnnnnnnnnnnnnnnnnnnnnnnnnnnnnnnnnnnnnnnnnnnnnnnnnnnnnnnnnnnnnnnnnnnnnnnnnnnnnnnnnnnnnnnnnnnnnnnnnnnnnnnnnnnnnnnnnnnnnnnnnnnnnnnnnnnnnnnnnnnnnnnnnnnnnnnnnnnnnnnnnnnnnnnnnnnnnnnnnnnnnnnnnnnnnnnncnnnnnnnnnnnnnnnnnnnnnnnnnnnnnnnnnnnnnnnnnnnnnnnnnnnnnnnnnnnnnnnnnnnnnnnnnnnnnnnnnnnnnnnnnnnnnnnnnnnnnnnnnnnnnnnnnnnnnnnnnnnnnnnnnnnnnnnnnnnnnnnnnnnnnnnnnnnnnnnnnnnnnnnnnnnnnnnnnnnnnnnnnnnnnnnnnnnnnnnnnnnnnnnnnnnnnnnnnnnnnnnnnnnnnnnnnnnnnnnnnnnnnnnnnnnnnnnnnnnnnnnnnnnnnnnnnnnnnnnnnnnnnnnnnnnnnnnnnnnnnnnnnnnnnnnnnnnnnnnnnnnnnnnnnnnnnnnnnnnnnnnnnnnnnnnnnnnnnnnnnnnnnnnnnnnnnnnnnnnnnnnnnnnnnnnnnnnnnnnnnnnnnnnnnnnnnnnnnnnnnnnnnnnnnnnnnnnnnnnnnnnnnnnnnnnnnnnnnnnnnnnnnnnnnnnnnnnnnnnnnnnnnnnnnnnnnnnnnnnnnnnnnnnnnnnnnnnnnnnnnnnnnnnnnnnnnnnnnnnnnnnnnnnnnnnnnnnnnnnnnnnnnnnnnnnnnnnnnnnnnnnnnnnnnnnnnnnnnnnnnnnnnnnnnnnnnnnnnnnnnnnnnnnnnnnnnnnnnnnnnnnnnnnnnnnnnnnnnnnnnnnnnnnnnnnnnnnnnnnnnnnnnnnnnnnnnnnnnnnnnnnnnnnnnnnnnnnnnnnnnnnnnnnnnnnnnnnnnnnnnnnnnnnnnnnnnnnnnnnnnnnnnnnnnnnnnnnnnnnnnnnnnnnnnnnnnnnnnnnnnnnnnnnnnnnnnnnnnnnnnnnnnnnnnnnnnnnnnnnnnnnnnnnnnnnnnnnnnnnnnnnnnnnnnnnnnnnnnnnnnnnnnnnnnnnnnnnnnnnnnnnnnnnnnnnnnnnnnnnnnnnnnnnnnnnnnnnnnnnnnnnnnnnnnnnnnnnnnnnnnnnnnnnnnnnnnnnnnnnnnnnnnnnnnnnnnnnnnnnnnnnnnnnnnnnnnnnnnnnnnnnnnnnnnnnnnnnnnnnnnnnnnnnnnnnnnnnnnnnnnnnnnnnnnnnnnnnnnnnnnnnnnnnnnnnnnnnnnnnnnnnnnnnnnnnnnnnnnnnnnnnnnnnnnnnnnnnnnnnnnnnnnnnnnnnnnnnnnnnnnnnnnnnnnnnnnnnnnnnnnnnnnnnnnnnnnnnnnnnnnnnnnnnnnnnnnnnnnnnnnnnnnnnnnnnnnnnnnnnnnnnnnnnnnnnnnnnnnnnnnnnnnnnnnnnnnnnnnnnnnnnnnnnnnnnnnnnnnnnnnnnnnnnnnnnnnnnnnnnnnnnnnnnnnnnnnnnnnnnnnnnnnnnnnnnnnnnnnnnnnnnnnnnnnnnnnnnnnnnnnnnnnnnnnnnnnnnnnnnnnnnnnnnnnnnnnnnnnnnnnnnnnnnnnnnnnnnnnnnnnnnnnnnnnnnnnnnnnnnnnnnnnnnnnnnnnnnnnnnnnnnnnnnnnnnnnnnnnnnnnnnnnnnnnnnnnnnnnnnnnnnnnnnnnnnnnnnnnnnnnnnnnnnnnnnnnnnnnnnnnnnnnnnnnnnnnnnnnnnnnnnnnnnnnnnnnnnnnnnnnnnnnnnnnnnnnnnnnnnnnnnnnnnnnnnnnnnnnnnnnnnnnnnnnnnnnnnnnnnnnnnnnnnnnnnnnnnnnnnnnnnnnnnnnnnnnnnnnnnnnnnnnnnnnnnnnnnnnnnnnnnnnnnnnnnnnnnnnnnnnnnnnnnnnnnnnnnnnnnnnnnnnnnnnnnnnnnnnnnnnnnnnnnnnnnnnnnnnnnnnnnnnnnnnnnnnnnnnnnnnnnnnnnnnnnnnnnnnnnnnnnnnnnnnnnnnnnnnnnnnnnnnnnnnnnnnnnnnnnnnnnnnnnnnnnnnnnnnnnnnnnnnnnnnnnnnnnnnnnnnnnnnnnnnnnnnnnnnnnnnnnnnnnnnnnnnnnnnnnnnnnnnnnnnnnnnnnnnnnnnnnnnnnnnnnnnnnnnnnnnnnnnnnnnnnnnnnnnnnnnnnnnnnnnnnnnnnnnnnnnnnnnnnnnnnnnnnnnnnnnnnnnnnnnnnnnnnnnnnnnnnnnnnnnnnnnnnnnnnnnnnnnnnnnnnnnnnnnnnnnnnnnnnnnnnnnnnnnnnnnnnnnnnnnnnnnnnnnnnnnnnnnnnnnnnnnnnnnnnnnnnnnnnnnnnnnnnnnnnnnnnnnnnnnnnnnnnnnnnnnnnnnnnnnnnnnnnnnnnnnnnnnnnnnnnnnnnnnnnnnnnnnnnnnnnnnnnnnnnnnnnnnnnnnnnnnnnnnnnnnnnnnnnnnnnnnnnnnnnnnnnnnnnnnnnnnnnnnnnnnnnnnnnnnnnnnnnnnnnnnnnnnnnnnnnnnnnnnnnnnnnnnnnnnnnnnnnnnnnnnnnnnnnnnnnnnnnnnnnnnnnnnnnnnnnnnnnnnnnnnnnnnnnnnnnnnnnnnnnnnnnnnnnnnnnnnnnnnnnnnnnnnnnnnnnnnnnnnnnnnnnnnnnnnnnnnnnnnnnnnnnnnnnnnnnnnnnnnnnnnnnnnnnnnnnnnnnnnnnnnnnnnnnnnnnnnnnnnnnnnnnnnnnnnnnnnnnnnnnnnnnnnnnnnnnnnnnnnnnnnnnnnnnnnnnnnnnnnnnnnnnnnnnnnnnnnnnnnnnnnnnnnnnnnnnnnnnnnnnnnnnnnnnnnnnnnnnnnnnnnnnnnnnnnnnnnnnnnnnnnnnnnnnnnnnnnnnnnnnnnnnnnnnnnnnnnnnnnnnnnnnnnnnnnnnnnnnnnnnnnnnnnnnnnnnnnnnnnnnnnnnnnnnnnnnnnnnnnnnnnnnnnnnnnnnnnnnnnnnnnnnnnnnnnnnnnnnnnnnnnnnnnnnnnnnnnnnnnnnnnnnnnnnnnnnnnnnnnnnnnnnnnnnnnnnnnnnnnnnnnnnnnnnnnnnnnnnnnnnnnnnnnnnnnnnnnnnnnnnnnnnnnnnnnnnnnnnnnnnnnnnnnnnnnnnnnnnnnnnnnnnnnnnnnnnnnnnnnnnnnnnnnnnnnnnnnnnnnnnnnnnnnnnnnnnnnnnnnnnnnnnnnnnnnnnnnnnnnnnnnnnnnnnnnnnnnnnnnnnnnnnnnnnnnnnnnnnnnnnnnnnnnnnnnnnnnnnnnnnnnnnnnnnnnnnnnnnnnnnnnnnnnnnnnnnnnnnnnnnnnnnnnnnnnnnnnnnnnnnnnnnnnnnnnnnnnnnnnnnnnnnnnnnnnnnnnnnnnnnnnnnnnnnnnnnnnnnnnnnnnnnnnnnnnnnnnnnnnnnnnnnnnnnnnnnnnnnnnnnnnnnnnnnnnnnnnnnnnnnnnnnnnnnnnnnnnnnnnnnnnnnnnnnnnnnnnnnnnnnnnnnnnnnnnnnnnnnnnnnnnnnnnnnnnnnnnnnnnnnnnnnnnnnnnnnnnnnnnnnnnnnnnnnnnnnnnnnnnnnnnnnnnnnnnnnnnnnnnnnnnnnnnnnnnnnnnnnnnnnnnnnnnnnnnnnnnnnnnnnnnnnnnnnnnnnnnnnnnnnnnnnnnnnnnnnnnnnnnnnnnnnnnnnnnnnnnnnnnnnnnnnnnnnnnnnnnnnnnnnnnnnnnnnnnnnnnnnnnnnnnnnnnnnnnnnnnnnnnnnnnnnnnnnnnnnnnnnnnnnnnnnnnnnnnnnnnnnnnnnnnnnnnnnnnnnnnnnnnnnnnnnnnnnnnnnnnnnnnnnnnnnnnnnnnnnnnnnnnnnnnnnnnnnnnnnnnnnnnnnnnnnnnnnnnnnnnnnnnnnnnnnnnnnnnnnnnnnnnnnnnnnnnnnnnnnnnnnnnnnnnnnnnnnnnnnnnnnnnnnnnnnnnnnnnnnnnnnnnnnnnnnnnnnnnnnnnnnnnnnnnnnnnnnnnnnnnnnnnnnnnnnnnnnnnnnnnnnnnnnnnnnnnnnnnnnnnnnnnnnnnnnnnnnnnnnnnnnnnnnnnnnnnnnnnnnnnnnnnnnnnnnnnnnnnnnnnnnnnnnnnnnnnnnnnnnnnnnnnnnnnnnnnnnnnnnnnnnnnnnnnnnnnnnnnnnnnnnnnnnnnnnnnnnnnnnnnnnnnnnnnnnnnnnnnnnnnnnnnnnnnnnnnnnnnnnnnnnnnnnnnnnnnnnnnnnnnnnnnnnnnnnnnnnnnnnnnnnnnnnnnnnnnnnnnnnnnnnnnnnnnnnnnnnnnnnnnnnnnnnnnnnnnnnnnnnnnnnnnnnnnnnnnnnnnnnnnnnnnnnnnnnnnnnnnnnnnnnnnnnnnnnnnnnnnnnnnnnnnnnnnnnnnnnnnnnnnnnnnnnnnnnnnnnnnnnnnnnnnnnnnnnnnnnnnnnnnnnnnnnnnnnnnnnnnnnnnnnnnnnnnnnnnnnnnnnnnnnnnnnnnnnnnnnnnnnnnnnnnnnnnnnnnnnnnnnnnnnnnnnnnnnnnnnnnnnnnnnnnnnnnnnnnnnnnnnnnnnnnnnnnnnnnnnnnnnnnnnnnnnnnnnnnnnnnnnnnnnnnnnnnnnnnnnnnnnnnnnnnnnnnnnnnnnnnnnnnnnnnnnnnnnnnnnnnnnnnnnnnnnnnnnnnnnnnnnnnnnnnnnnnnnnnnnnnnnnnnnnnnnnnnnnnnnnnnnnnnnnnnnnnnnnnnnnnnnnnnnnnnnnnnnnnnnnnnnnnnnnnnnnnnnnnnnnnnnnnnnnnnnnnnnnnnnnnnnnnnnnnnnnagtgcgtttcttgcggacttcgatttgtaccgatttgctttttccaccggtaccaggaatgttaagggtgctgcgtgttttacgttgcagcgtcaatttgtccgggcctgaatttttctgattcaggtggtcaatcaaagtctgtttctcttgtgcagacacagagtcgtcagcagacttccggatacctgcatcagcaaattgctgtaccaggcgttccacggaggtctgtcgctctgcggccagcgttttaatcgttacatctgtcatgctgttccttcctgctacagtttattacgcttcgtcaccgaaccagcaaatattacgggcagccataatcaatgctccggctttttcgtcggtcaacccttcgatatcagccagatcatcaatgccctgttcggcgagatcttccagcgtacaaacgccacgggcggccagtttgaatgccaaatcacgatctaccccttcaaggttcagcagatcatcagccggtttgttatcaccgaggctttcttcctgggcctgtgcaatggtggccagtgcatttttagcacgctcgcgcagtgcttcaacggtcggctcatcaaggccttcgatttccaacagctctttcatcggcacataggccagttcttccagcgtcgagaagccttcttctaccagaacagtcgcgaagtcttcatcgatgtcgagatatttggtgaaggtgtcgatcgctgcgtgcgcttccgcctgatgcttagcctgcaggtcgtcaacggtcatcacgttgagttcccaaccgctcagctgcgaagccagacgcacgttctgaccgttacggccaatcgcctgcgccaggttaccggcttcaacggcgatatccatggtgtgtttatcttcatccaccacgatagaagcaacgtctgctggtgccattgcgttaatcacaaactgcgccgggttatcatcccacaggacaatatcgatacgctcgccgcccagttcagtagaaaccgcctgaacacgcgcgccacgcatacctacgcaagcacctaccggatcgatacgtttatcgttggttttcaccgcaattttcgcacgagatcccgggtcgcgagccgctgctttaatttcaatcacttcttcgccgatttccggcacttcaatacggaacagttcgatcagcatttccggcttggagcgggtgacgaacagctgcgcgccacgcgcttccgggcgaacggaatagagcacgccacgaacgcggtcaccagggcggaagttttcacgcggcagcatatcttcgcgcaggatcacggcttcagcgttgttgcccagatccagagagatgttgtcgcggtttacttttttcaccacgccggtgatgatttcaccttcgtgttcacggaactgatcaaccaccatcgcacgttcggcttcacgcactttctgcacgataacctgttttgccgtctgggtagtgatacggtcaaaggtaacagactcaatctgatcttcaacgtaatcgcccaggttcaggctttcatcttcataacgtgcggcttcaagggtgatttccttggtcggctgggtgacttcatcaacaactaaccagcgacggaaggtgtcaaaatcaccgcttttgcgatcgatctgtacgcgaacgtcgatttcttgttcatattttttctttgttgctgtcgccagcgcgctttccaatgcttcgaaaatcttctcgcgaggtagcgccttttcattggatacggcttcaactacagccaaaatttctttgttcatcgcgggcttttcacctcatccagactattaaaagtggggaaccaggttcgccttctggatattactcagcgcgaacacttcatctttaccttcgacggtaactgtgatcatttcaccgtctaccgctttgataacgccctgccatttacgacggttttgtaccgccatacggagaaccagagtcacctcttctccgacaaaacgggcgtagtgttcagccgtgaacagtgggcgatcgagacccggtgaggagacttccaggttataagcaacggtgatggggtcttcaacatccagcacagcacttacctggtggctcacatcagcacaatcatcaacattgatgccatcttcactatcaatatagatgcgcagtgtggatgtgcgaccgcgaataaattcgatgccaaccagttcaaaacccagggcctcaactggcgcagtaatcatctctgttaatttttgctctaatgtggacaagcccacccccaagacataaaaaaagggcctaaagcccagttattctgtagtcagataacaaaaaaccccgataaatcggggctttatataactgaaccctataaccgcaactgcggtctggagcactttccagaaggattttttcaaatcccactacgaaggccgaagtcttcacagtatatttgaaaaaggactctaagggaaagtggttgcgggggccggatttgaaccgacgaccttcgggttatgagcccgacgagctaccaggctgctccaccccgcgcctgaaacgtggcaaattctactcgttttgggtaaaaaatgcaaatactgctgggatttggtgtaccgagacgggacgtaaaatctgcaggcattatagtgatccacgccacattttgtcaacgtttattgctaatcacgtgaatgaatatccagttcactttcatttgttgaatacttttaccttctcctgctttcccttaagcgcattattttacaaaaaacacactaaactcttcctgtctccgataaaagatgattaaatgaaaactcatttattttgcataaaaattcagtgaaagcagaaatccaggctcatcatcagttaattaagcagggtgttattttatgacgacgattctcaagcatctcccggtaggtcaacgtattggtatcgctttttccggcggtctggacaccagtgccgcactgctgtggatgcgacaaaagggagcggttccttatgcatatactgcaaacctgggccagccagacgaagaggattatgatgcgatccctcgtcgtgccatggaatacggcgcggagaacgcacgtctgatcgactgccgcaaacaactggtggccgaaggtattgccgctattcagtgtggcgcatttcataacaccactggtggactgacctatttcaacacgacgccgctgggccgcgccgtgaccggcaccatgctggttgctgctatgaaagaagatggcgtgaatatctggggtgacggcagcacctataaaggaaacgatatcgaacgtttctaccgttacggtctgctgaccaatgctgaactgcagatttacaaaccgtggcttgatactgactttattgatgaactgggtggccgtcatgagatgtctgaatttatgattgcctgcggtttcgactacaaaatgtctgtcgaaaaagcttactccacggactccaacatgcttggtgcaacgcatgaagcgaaggatctggaatacctcaactccagcgtcaaaatcgtcaacccaattatgggcgtgaagttttgggatgagagcgtgaaaatcccggcagaagaagtcacagtacgctttgagcaaggtcatccggtggcgctgaacggtaaaacctttagcgacgacgtagaaatgatgctggaagctaaccgcatcggcggtcgtcacggcctgggcatgagcgaccagattgaaaaccgtatcatcgaagcaaaaagccgcggcatttatgaagcccctgggatggcactgctgcacattgcgtatgaacgtttgttgaccggtattcacaacgaagacaccattgagcagtatcacgcgcatggtcgtcagttgggccgtctgctgtaccagggacgttggtttgattcccaggcgctgatgctgcgtgactctctgcaacgctgggttgccagccagatcactggtgaagttactctggagctgcgccgcgggaacgattattcaatcctgaataccgtctcagagaacctgacctacaaaccagagcgtctgacgatggaaaaaggcgactcggtgttctcgccagatgatcgtatcggtcaactgaccatgcgtaacctggatatcaccgatacccgcgagaaacttttcggttatgccaaaactggcctgctctcctcctctgccgcttcaggggtgccgcaggtggagaatctggaaaataaaggccagtaattcgacatcaaccctgcccttcaggggtggggttaccttgattatcctctgtaaactcctttctgagcatcacataatcgaaaacatcatggtttgcatccacaacccgtgagtctcctttatagtgtgcaatcacttcctcaagcgtttgcggctgttccggctttgttacccccatccacgcattaataaggtaattattgtaagctgtcgaaaagatgttgttttccgttgtgcgatccacgccatcccctagaacggggctataccagataaacatcgggacatgatacgcctgctggctagcctccctgcctccatgaaaatagacgttcttcttcgtagggtcgcgttccaggccgtggtcggcaaaatacatgaccgaggcgcggcgatcttttaataattcaaaaacctgacctagcaaactatctgtgtaatgaatggagttgtcatagcaggcatcctgatcgtcctgcggttgaaacacagcgctggattgcggataggcgctacaagccggttcatggcttccatttaaatgaagaacaatcagtttcttttgctgcgtcttttgctgtaacgcttgcgataaatgcggcaacaacaattcatcaaatcctctgacatagactgtttccatggcgcgcatggcgatactggtaactgctgtaccattctgccgaaaagcggattgcgagcttagccagaaagtctgaaatcctgcttgattagccatattaataatgttgtccgggtaattatgaatgtcatgactcaaaacagaatcagcagttaaagaaaggggaaccgacagcgcagtgtaaggtgcaccgcttattgcttgattaaacagtttgatctgttttctttgtgcttcgacttgcggtgtcgtagagcgtgtatatccatacaaagacatattgtcgacacgtacagactcccccacaatcaacacgtaggtatcaatacctgtatccctgactgataattgaaaacacggcaccgtgtttgcaattgagagtaatctttgatgctctttcgctgctaaagcaaaataattgagattgaaaaacggtgtataggtagcaaatcgcgacgctagtatatatggactgaacgcttttttattttttgcatctttataagcaaattgacaagcggaaaataaactgcccgaaatgacaatcagcaataatattcctgtcacttttttcgtcggcaaggaaacatcatattttattattactgccaaaaaaagaagggataaaaaggcaaaagcacatagataagggatatacatccccagcattttgacaacttcatccggatcactctgcagcacactaatcgcaaatccatcattgaaagttgtaccaaaggtacaccatgaatagaggctaatactcatgtctgccgctgtcagtaacacaaatggtgtggcaacaagcaggcgaagcggaagggatgatatacgtttaacaaccaggatggtcagaacgaaaaacagcaatcgctgaaccatatgcgctccggaagaggcgactaagttcgtaataccaaaaacaataacacaaagatacaacaaccaatgagatttaaaacttctaacaaatttgttgaatactgtcatccagaaatccaagttcacaaccaatataaacaattatcaacaatgttcaattttatatcagacatgtttttcaactctgatccatatcagaccgaaacactgttagttttttctttttaaatgatgcggccattgttctcagtaattaaataacattatcaatgcgtctctaaacattacgcagaacgtagccatcagtagttatactgacaggagcaggatggtttatcgagaagtaaacatatccgtattcgtaccggaactggagttgacacaataaagtgccaattatgtcagcagaagggaaaagtttataactaaggcgtaccggcaccatcgtttcaaagtaccagctacgagtaaagcaactggacgagatacagatacctgacaaccattcctcagaccaggaccaaaacgaaaaaagacgcttttcagcgtctcttttctggaatttggtaccgaggacgggacttgaacccgtaagccctattgggcactaccacctcaaggtagcgtgtctaccaattccaccacctcggcacggatactactttttagttcgggatatcgctggtcggcttagccggagcagctggctgagtttgttcggttttcgccggcgcactcaggttttcccattcgctacctttattggttttattgctattgatgttacccagcaccagactgatgatgaagaataacgttgccagcagcgccgtcatgcgggtcatgaagttaccagaaccacttgaaccaaacagcgtagcggaagcgcctgctccgaaggaggctcccatatcagcgcctttaccttgctgcagcatgatcagaccaacaaggccaattgccacaataaggaaaactactaaaagagcttcgtacataatcaacctgttccttgcggagttgccgcgtaccaatgcttcaaccaataaagcgggagtttttaatctttcccactgaagcgggtgtgaatactaaccaaagcgaatgaccttcgcaagggcaattttattgcattgtatcaactgcggaaaaaaacagcaaaaccgatgtgttcgctgagaaaaaaggcgacaatcgccgcctttttagccagttatctaacgctttaaacggcttttactgcatcggcgatgcggtgtgcaaattcagtcacctgcgcttcgtcttcgccttccaccatcacgcgaattaacggttcggtgccggatttacgcaacagcacacgtccacggctacccagcgccgcttcaacttctgcggtcacagctttgactgattcatgctccagcggatcgccgctacctgcggtgtaacgcacgtttaccaggatttgcgggaacattttcatgccgctgcaaaggtcgtgcaggctcatatgattacgcgccatcgccgccagcacctgcaaaccagcaacgatgccgtcaccggtagtggttttatccagcaggatcacatgaccggaattctctgcaccgatacgccagcctttctcctgcattttttccagtacgtagcggtcacccactttcgcgcgcgcaaatggaattcctaactgtttcagcgccagttcaagccccatgttgctcatcaatgtacccacagcgccaccacgcagctggccctgacgaagaccttcacgcgcgatgatatacatgatctgatcgccatcgactttattgccttcatggtcaaccataatcacgcgatcgccgtcgccgtcgaaggcaataccgagatccgctttttcagccagcacacgagcctggagcgcgcgaacgtcggtagcccccacttcggcattgatgtttacaccgttcggctcacaaccgatagcgataacgttcgctcccagttcacgcagcacgttcggcgcgatgtgataagtcgcaccgtttgcacaatccaccacaatcttcagttcactgaggctaagttcgtttgggaacgtggctttgcaaaactcgatatagcgacccgcagcatcaacgatacggctggctttacccagttctgccgaatcaacacagctgatctctttttccatttccgcttcgatggcctcttctactgcatccggtagtttggtgccgtcgatagagaaaaatttaatgccattatcgtagaacgggttatgcgatgcagatatcacaattccggcctctgcgcggaaggtacgcgtcagataagccacggccggtgttggcatcggaccagtgaagagtgcggaaaggcccgcagccgccagacccgcttccagtgctgactccagcatgtagccagaaatacgcgtgtctttaccaatgatgatcttacgggagccgtggcgcgccagcactttacccgcggcccaacccagcttaagcacaaaatcaggggtgatcggcgcatcccctacacgaccacgaatcccatcggtaccgaaatatttacgattactcatagcgtttgttttcctttgcagacagagtggcttccaccacccgcatcgcttctacggtttctttgacgtcatgaacacgaatgatatgcgcgccttgcatagcggcaatgaccgcacaagccagactaccgctcagacgctcggacggccccacgttcagcagctgcccaatcatcgattttcgtgacatacccaccaacagcggcaggttgaaatggtgaaattcagccaggcgcgccagtaatgaatagttatgggagagatttttaccgaaaccgaatccggggtcgagcaacaatttctcttttgcgatacccgcctgctcgcaacgtgctatttgctcaataaaatagcgattcacttctgcaaagacatcgtcatacttcggggcttcctgcatggtctttggatttccctgcatatgcatcagacaaaccggtaaaccggtttctgcagctgcctccagagcccctggttcggaaagggagcggatatcgttaataatgtgagcgccaactttcgctgactcacggatgacttctggtttggatgtatcgaccgagatccagacttcgaagcgttgagcaattgcctcaaccacaggaataacacgttgcaactcttcttcaacgctaacttccgccgctcctgggcgcgtggactcgccaccaacgtcaatgatcgtcgcgccagcgttgatcatcagattcgcatgtttcaccgcatctatcagcgagttatgcgtaccgccatccgaaaaggaatcaggcgtgacgttgaggatccccattacgtgaggatggctaaggtccagtgaagtgccctgggcaaagagtttcatggtgttatccctggtatgaattgataagaaaaaaccccggagcacgccccggggttttcggtacaaatacagtcatctgatgcgggaacttatttgtcgcctaactgctctgacatggtgttacccgggttcggcgtacgcggttcatcaaccggacgaggagcctttggactaccattgtcgccagaattgttagaagcgcctggttcttcccagcccgctggcggacgtacatcgcgacgtgccatcaggtcatcaatctgcggtgcgtcgatagtctcatatttcatgagagcatctttcatcgcatgcagaatatccatattgtcggtcagaagctgacgcgcacgattatagttacgctcaatcagtgctttcacttcctggtcgatgatacgtgcagtttcatcggacatatgtttcgctttcgctacgctacggccgaggaacacttcaccttcttcttccgcgtacagcagtggacccaatttctcagagaagccccactgagtcaccatgttacgtgccaggttggtcgcaactttaatatcgttggacgcaccggtagaaacatgttccggcccgtagatgatctcttccgccagacgaccaccgtacagcgtagaaatctggctttccagtttctgacggctggcgctgattgcgtcgccctcaggcaagaagaaagtcacacccagcgcacgaccgcgtgggataatcgtcactttgtgcaccggatcgtgttccggcaccaggcgaccgataattgcgtgacccgcttcgtggtaagccgtcgattctttctgcgcttccgtcatcaccatggagcgacgttccgcacccatcatgattttgtctttcgctttctcgaactcaaccatcgaaacaacgcgtttgttgccacgagcagcgaacagtgccgcttcgttcaccaggttcgccaggtcagcaccggagaaaccaggagtaccacgggcaatgattgccgcgtcgatatcgggtgccaatggtacgcgacgcatgtgaactttcaggatctgctcacgaccgcgaacatctggcaagccaaccacaacctgacggtcgaaacggccaggacgcagcagggctgggtcgagaacgtccggacggttagtcgcagcgataacgatgataccttcgttaccttcaaaaccatccatctcaaccagcatctggttcagagtctgttcacgttcatcgtgaccaccgcccaagcctgcgccgcgctggcggcctacggcgtcgatttcatcgataaagatgatgcacggcgccgctttcttcgcctgttcgaacatgtcacgaacacgggatgcacccacaccgacgaacatttctacgaagtcagaaccggagatagtaaagaacggaactttcgcttcgcctgcaattgctttcgccagcaacgttttaccggtacccggaggacctaccatcaggacgcctttcgggatcttaccgccgagtttctggaagcggctcggctcgcgcaaatactcaaccagttcagcaacttcttcttttgcttcgtcgcagcccgcaacgtcagcaaaggtggttttgatctgatcttccgtcagcatgcgcgctttgctcttaccaaacgacatggcacctttgccaccgccgccctgcatttgacgcatgaagaagatccagacaccaatcagcaacagcatcgggaaccaggagatgaagatagaagccagcaggcttggttcttcaggcggttcaccgacaaccttgacgttcttggtcaacaggttatccagtaatttcggatcctgaaccggaatgtaagtggtataacggttactatctttcttggtaacgttgatttcacgtccgttgatacgcgcttcacgaacctggtcgttattgacctcttgtaggaaggtagagtaatccaccttacggccattagactcgctgggcccaaagctctggaatactgacatcagcacaacggcaatgaccagccagagtattaggtttttcgccatgtcactcaagggattaacctcttattacaactgtgttaaaaacagcgtcaggatactctatatccagcatctttcaaactttcgtctgaaatctcccggttagggtttacgcccggtcgctacaatatacacttcccgcgaacgtgcacgagaagagtccggcttacgaactttgaccttcgtaaacagggagcgaatttcccttagatactcatcgaaaccttcgccctggaacaccttcactacaaaactgccacctggcgctaatacatcacgacacatttctagcgccagttccaccagatacatggcacgggggatatccaccgccggtgttccgctcatgtttggtgccatatcggacatgacaacctggactttgctgtcgccaacgcgctccagcagtgctttcatcaccagttcatcacgaaaatcgccctgaagaaagtccacaccaacgataggatccataggtaaaagatcgcaagcgatgatgcggcctttgccgccaatttgggtgaccacatattgtgaccaaccacccggagctgcaccaaggtcgacaaccgtcattcccggtttaaagagtttgtcactttgctgtatttcatcaagtttaaaccaggcacgggaacgtaacccctttttctgtgcctgttgaacatatttatcgctaaagtgttcctgaagccagcggctggagctggcagaacgcttcttacctgtcatttaactttcccatggggataactcatcgtaaccaattgcgtaaatttttacgcgcctatttggtgatatatgggagatggcggtagaatgacccgttttcaatcccaacgtaagcaaaaaatacgatgaatctgagtactaaacaaaaacagcacctgaaaggtctggcacatccgctcaagccagttgttctgcttggcagtaatggtttgaccgaaggggtgctggccgagattgaacaagcgttagagcaccatgaactcatcaaggtgaaaatcgccaccgaagatcgcgaaactaaaaccttgatcgtggaagctatcgtgcgcgaaaccggcgcctgtaatgtacaggtcatcggtaaaacgctggtgctttatcgcccaactaaagaacgtaaaatctcgctgccacgctaagattatcctaaagttacacacattcgctgtgtaaaacgaggggttttccgcaggcaggagagcaaaatgccacgctctgttcgttgataaaaggccgcatagcggcctttttcctttctttacaatacatcaacatcttgagtattgggtaattcttacaggtattccaccttaattacttcaaattctacttcgccgcccggcgttttgatgaccacaacatcatcttcttctttgccgatcaggccacgagcaataggcgagtttacagaaatcaggttttgtttaaagtcagcttcgtcatcgccaacgatgcgataagtctgttcttcgtcagaatcgagattcagcaccgttacggtagcaccaaaaataacgcgcccattgttgggcattttggtgacatcaatcacctgcgcgttcgacagcttggcttcgatgtctttgatacggccttcgcagaaaccctgctgttcacgagctgcgtggtattcggcgttttctttcaggtcgccatgctcacgcgcttccgcgatagcagcaatgatttcaggacggcgcacagatttcagaaaatccagctcttcgcgtaatttttcagcgccgcgtaaggtcatcggaatagcttgcatttgttatacctcttgaatattcctgatggggcaagtcttcacccaccccggctgttcggcctgcccggcataactcctcaccgggaccagaagcaaaaaaaataccgacccgggtacaagtcccaggtcagctacaattcacattttgatagtcattttaccctggagttcccgaagggtcatcgtttactttatagggcgttgcgccgtagtatgacggctcgattccaggttgttagcgcgagattatgcgattttccagatttatcatcggattgaccagctgtatagcgttcagtgttcaggccgcaaatgttgatgagtacattactcaactccccgcaggtgccaaccttgccctgatggtgcaaaaagtcggcgcgtcggcccccgctattgattaccacagtcagcagatggcgctacccgccagtacgcagaaagtaattactgcgctggcggcgttgattcaactcggccccgattttcgttttaccacgacgcttgaaaccaaaggcaatgtggaaaacggcatacttaagggtgacttagtagcgcgatttggtgccgatccgacgttaaaacgtcaggatattcgcaatatggtcacgactttgaaaaaatctggcgtcaaccaaatcgatggcaatgtgttgatagatacctccattttcgccagccacgataaagcccccggctggccatggaatgacatgacacaatgctttagcgctccgcctgccgccgccatagttgaccgcaactgtttctccgtctcgctctacagtgccccaaaacctggtgatatggcttttatacgcgtggcatcttattaccccgttacgatgttcagtcaggtacgcaccctcccccgtggttctgccgaagcgcaatactgcgaactggatgtcgtacttggtgacctgaaccgctttacgctaacgggatgcctgccacaacgttctgagccgctcccgttggcttttgccgtgcaggatggtgccagctatgccggggcaattctgaaagatgagttaaaacaggcgggtatcacctggagcggaacgctgctgcgccagactcaggttaacgaacctggaacggtagttgccagtaaacagtcggccccgctgcacgatctgcttaagattatgctgaaaaagtcggacaacatgattgccgatacggttttccgcatgatcggccatgcgcgcttcaatgtgcctggaacatggcgggccggatcggacgccgtgcgtcagatcctgcgccagcaagccggtgtcgatatcggaaacaccattattgccgatggttcagggctttcgcggcataacctgattgcccccgccaccatgatgcaggtgctgcaatatattgcccaacacgacaatgaacttaactttatctccatgctgccgctggcgggctatgacggctctttgcagtaccgtgcaggtctgcatcaggcgggcgtggatggaaaagtctcagcgaaaaccggttcgttgcagggggtatataacctggcgggattcattaccacagcgagcgggcaacgaatggcgtttgtgcaatatctttctggctatgcagtagaaccggcggatcagcgtaatcgccgtattccgttagtgcgttttgaaagccgtttgtataaagatatttatcagaataattagcctaaagagaaaccccggcacatggccggggttttgctgattaacgcttgtaaatgaactcaacgccttcttcgtcgtcttcgtcccagtcgtcatcccagtcctcatcatcctcttcagcaatctcttcaagctgctgacggtgataatcatcccacatgaattcgactttctctggctgtttcgcttcttcagcctgcacgaccgggttttcaatgataaaggtcatcacatcccagcagagatctttcacgcccagtccgctcgccgcagagatcagataatatttatcttcccagcccagcgcttcagcgatcgctttcgctttctcttcggcttctaccttatccagcagatcgatcttgttgaagactaaccaacgcggtttcgccgccagatcctggctgtatttttccagctcactgataataatacgcgcgttttcaaccggatcggtgccgtcaatcggatcgatatcgatgaggtgcaacaggacgcggcaacgttccaggtgcttcaggaagcgaatgcccagacctgcgccttctgcagcgccttcaatcagtcctggaatatcggcaacaacgaagctcttttcgttgtccatacgcaccacgcccaggcttggtaccagagtggtaaacggataatccgccactttcggtttagccgccgataccgcacgaataaaggtcgatttacccgcgtttggcatccccaacataccgacgtcagccagcagcatcagctccagcagcagctcacgcttatcgcccggcgtaccgttagttttctgccgtggtgtacggttaactgacgacttgaaacgggtattgcccagaccgtgccagccgcccttagcaaccagcagacgctgaccgtgtttggtcatatcgcccatggtttcaccggtaccctggtcgattacacgcgtacctaccggtactttaatcgtgacgtctttaccgcgcttaccggtacagtctcggcttgcaccgttctgaccgcgctctgcacggaaagatttttcaaaacgataatcgataagcgtgttcaggttctcgtcggcttccatccatacgtcaccaccatcaccgccgtcgccgccatccgggccgcctttcggaatatacttttcgcggcggaagctcacgcaaccattaccgccatcacctgcaacgaccagaatcgatgcttcatcaacaaacttcattttattctccgtaaatcattcgcctgcgcggggttgcgataccaccgttgtatgcttacgtaatccgccccaaatacgatgaccaatggcggaatacatcgcgcccgcaaccacgacaaacgcaccgagataacctaaaaggtttaacatcggtctggcgaagaaatcgggccaggccagtgataaaagatctgaaaaaaacagcgtaaacagtggggtgagcgtgatgatcgcgctcacctgcgctgcctgccagcgagccatcgcttccgccagggcgccatatcctaccaatgtattcagtccgcaaaaaattaaacatgcgagctgccagtggctaagctgcgctatcactccaggatttgccagagggaagagcgcaattgtacataaagtgtacagtaaaaacaggatctgcggtgaagccagccgacgcaataaaaccttttgcgccacgccataactcacccaaaccgtcgccgcaccgaccccaaagataactccccaggtgtaatcggtgagctttgtaaatatctcgaccagactggtgttaaaaaacatcaccaggccgctcaggagcatcaatgcccctacaacctgagtactgcgcattttctctttcaggataaatacgctggcaaccatcatgccaactggcgagagttgcccaatcacctgcgaagcggtcggactcaggtattgcaaggatgagctgaacaggatgaagttcccaaacagcccggcggtcgccactgctaacaaaatcaaccagcgtggcttacgaaacacgcgtaatggcggcaaccgcttcttcaccgcaagaatggcaccaaggccaatactcgccatcaagaaacggtaaaacacgattgtcggaggttccatcacctccagcacctgcttcattgcgattggcaacgccccccagcaaattgctgtggtgagcgccaaaagaatgccaatgcctgcctgctgcttcataccgtattccctgcaaagcgcatatgcggattaacgtcgcaccatgcgcatttttaccggttatcgaatgtaaaaagccccgcaacgtgttgcggggctttcatccgttaccgggacgcgaaaaacttattcagcttcgatgctgataaatttacggtttttcgggcctttaacttcgaatttcactttaccgtctgctttagcaaacagagtgtggtcacgaccgcaacctacgttagcgccagcgtggaatttggtaccacgttgacgaacgatgatgctacccgccagaacggattcgccaccgaaacgcttaacgcccaggcgtttagcttctgaatcgcgaccgttacgtgtggagccgccagcctttttatgtgccatttgaaatctctcctcaggtcttaggcgctgatgccagtaattttcacatcagtgaaccactgacgatggccctgctgcttacgatagtgtttacgacgacgaaacttaacgattttaactttctcgccacgaccgtgagcaacaacttcagctttgattacgccgccatcaacgaaaggaacgccgattttgacttcttcaccgtttgcgatcatcagcacttcagcgaactcaacagtttcgccagttgcgatgtccagcttttccaggcgaacggtctgaccttcgcttactcggtgttgtttaccaccactttggaaaaccgcgtacatataaaactccgcttccgcgcacaccttttcaatgattcagagtgcgctataaatattcacaatagggcgcgaatattacgcaaaacgcacgcctttgacaagtgctacagtcaatacacgaagaaaaaaaacacaacttgtacggtaacgtttatctgtgccattttttcagtacaatcaccctatattcctaaccataaaccctaagttgcctttgttcacagtaaggtaatcggggcgaaaagcccggcttttgcgatgaatttagaaaaaatcaatgagttaaccgcgcaagatatggcgggtgttaatgcggcaatccttgagcagcttaattccgacgtccaactgatcaatcagttaggctattacatcgtcagcggcggcggtaaacgtattcgtccgatgattgctgtactggctgcacgagctgttggctatgagggaaatgcgcatgtcaccattgctgccctgatcgagtttatccacacggcgactctgctacacgacgatgttgtggatgaatcagatatgcgcaggggtaaagctaccgccaacgccgcatttggcaatgccgccagcgtgctggtaggcgattttatttatacccgcgcgttccagatgatgaccagcctcggttcactcaaagtgctggaagtcatgtcagaagccgtaaacgtcatcgcagaaggtgaagttctgcaactgatgaacgttaacgatccggacatcactgaagaaaactacatgcgcgttatctacagcaagactgcgcgtctgtttgaggctgccgcgcagtgttccgggattctggctggctgtacgccggaggaggagaaaggcctacaagattatgggcgctatctcggcactgctttccagttgatcgacgatttactcgattacaatgccgatggcgaacagttaggtaaaaacgtcggcgacgatctgaacgaaggtaaaccgacgctgccgctgctgcatgcgatgcatcatggcacaccagaacaggcacagatgattcgtaccgccatcgaacagggtaacggtcgccatcttctggaaccggttctggaagcaatgaacgcttgtggatctcttgaatggacgcgtcagcgtgccgaggaagaagcagacaaagccatcgcagcgttacaggtgctcccggacaccccgtggagagaagcactcgtcggcctcgcgcacatcgctgttcaacgcgatcgttaatcccctcccctcatcccgcgcagtgcgcgggatgattccagtaaattccataaaatacttattcagctctataactcctgaaaaactgggctgtgtatctttatatattctgaatattcacactctttacaggaactttttagagcaataggccatcaggagtatagtgatgctcgacagaaacagaagaagtgttctgaatgaaagcgactaacttaaggagtgaggaaagatggaaagtaatttcattgactggcatcccgctgacatcattgcaggtttgcgcaagaagggaacgtcaatggcggcggagtctcgcagaaatggtttgagttcctcaacgctggcgaacgcattatcacgcccatggccgaaaggagagatgattattgcgaaagccctgggaactgacccctgggttatctggccatcacgctaccatgatccgcagacccatgagtttatcgacagaacgcaattgatgcgtagctacactaaaccgaaaaaatgagtggtctggcggtagccccgcgaacggggctgccagctctcagacaattactcgcctttcacacgctcaatatttgcacctaaagcgcgtagtttgtcttcaatgcgttcgtagccacgatcgatgtgataaatacgatcaaccaccgtcgtcccttccgcaatacagccagccagcaccaggcttgctgatgcacgcagatcggttgccataacctgtgcgccagaaagtttttcaacaccgtgacaaataacggtattgctttcgatttcggcgtgcgcgcccatacggctcagctctggcacatgcataaagcggttttcaaagaccgtttcggtgatgaatccggtcccttctgccaccaggttcaacagcgtgaactgggcctgcatatcggtagggaatgccggatgcggcgcggtacgtacgttaacagccttcggacgtttgccatgcatatccaggctaatccagtcctcgccgacttcgatgtccgctccagcgtcacgcagtttcgccagcacggcgtccagagtatctggctgcgcgttacggcagataattttgccgcgagagatcgccgccgccaccaggaaagtaccggtttcgatacgatccggcagcacgcgatagacaccgccgcctaaacgttccacaccttcgatgacgatacgatcggtgccctgaccgctaattttcgcacccagcgtaatcaggaagttcgcggtatcgacgatttccggttcacgcgctgcgttttcaataatcgtggtgccttccgcaagggttgcagcacacatgatggtcaccgttgcgccaacgctgactttatccatcacgatatgtgcgcctttcaaacgaccatcgacggaagctttaacgtaaccttcttccagtttgatggtcgcgcctaattgttcgaggccagaaatgtgtagatcaaccggacgtgcgccgatcgtacaaccgccaggcagtgaaacttgcccctgaccaaagcgcgctaccagcggccccagcgcccagatagaagcacgcatggttttaaccagatcgtaaggtgcgcagaatacattaacgtcgcgggcatcaatatgcacagaaccattacgttctactttcgcacccagctggcttagcagcttcattgatgtatcgacgtcttttagtttcgggacgttctggatctctaccggttcttccgccagtagtgcggcaaaaaggataggcagagcagcatttttagcgccggaaattgtgacttcgccctggagcttcgttggcccctgaacacgaaatttatccatttagtttgttctcagttaacaattcatatccgctaccggcgaatcgcccatagctcaaaagccgttcagtttgcgatcgcgcgcccactccgcaggggtatacgctttgatcgacacagcatgaatgcggttatccgcaatatattccatcagcgggccatagaccgtctgctgttttttaacccgactcatgccgtcaaacaactcacccacggcaataacctgaaagtggctgccatcgccggaaacgtggacttcctggagggagagagcgttcatcaacacgctctgaatttcattattttccatgggatcttcaatcatcagttaataaatcagcgaaacatcttagagcaaagttgcgctggcataaataagcaaaaagcctcgctgataaatcagacaaggctcgacttgcaggcaggtttgccggacaggcggttaacgccatatccggcctgaaaaaatttaacgaggcagaacatcagcaggcaaattatacaatttcgccagggtatacactttgtcgtttaccccctgaagcgtcacattgttgccctgctttttcgccagatcgataagatggagcagcagtgccagtccacccgtatccacgcgagacacacggctaagatcgatgctggtaatccccttcaccgcttcctcacgtatttcccaaagcggtagcagaacgtcctgatccagctctccggataacgccagcgtgtcacccgtctgcatccagctcagtgactcgctcattattttttctcttccagagtgattttctgttgagaaatcgatttcagttgcgcagtcaggccgtcgatacctttggtacgcagcagcgttccccactcgttttgtttggtggtgatcatactgacgccttcagcaatcatgtcgtaagcctgccagttgcccgtctgggagtttttacgccactggaagtccagacgcaccggcggacggccattcgggtcaataatggtaacgcgaatcggcacaatggttttatcacccagcggctgttctggcgcaatctgataggtttgaccgtgatacatcgccagcgcctgaccgtaagcctgcttcaggtactcacggaaagcggcaaagtaagcatcacgttgagctggggtcgcactcttgtaatactggcccagcaccagcgcaccggcgtatttcacctgtacgtatggcaacagttcctgatcaacaatggtacgcagataatccgggttagcctgaatttgcggttgctcattcttcaggcgatcgaacgttttctgcgccgcctcgtccatcagcttatacggattggtctggtctgccgcggttgccgcactcagcggtgcaatcaccagcaaagcgaccatcattaaacgtttaaacatgcgtcggttctcctgaaattatttcgttgtacccacaggttcagtggtttcattattacctggcgcagcagctggcgcatcgccactattcttattgtcatcgtctttactaccgtaaaggaactgaccaatgagatcttccagcaccatcgcagacttggtgtcctgaattgtatcgccatccttcaggatagcagtccccagttccgggtcttcaaaaccgacgtttaatgccagatattgttcccccagcaggccggaagtacgaatgctcagcgaactggtatcaggaatgtggttataacgttgttcaatttccagcgttacgcgcggcagataggttttcgggtccagcgtaatatccgccacccggcccacaacaacgccaccaatgctgaccggagagcgggctttcaggccgccaatgttatcgaacgtcgcataaagcgtataggtcggttcagtacgtatagacgtcacgttcgctgccttcaggcaaacaaacagcgccgcaagcagtgctgctaataaaaagatacccacccaaatttcattttttttcgtttgcatgaactcaattcccaaacatcaatgcggtcagcacaaaatccagccccagaacagccagagacgagtggacaacggtgcgagtggttgcccggctaatcccggcagacgtcgggatggcgtcgtagccgttaaacaacgaaatccacgtcaccgtgatagcgaacaccacgctcttaatcagacagttgacgagatccatacgccagtcgacggcattttgcattgccgaccagaagaacccactatcaatgcctttccaactgacgccgaccagcgatccgccccagatccccacggcgacgaagataaccgtcaacagtggtaatgaaataactccagcccagaaacggggagaaataacccgacgcagcggatccaccgccatcatctccatactggagagttgctctgtagcgcgcatcaggccgatttctgcggttagcgccgaaccagcacgcccggcaaacaacaacgcggcaaccaccggccccagttcacgcagtagcgataacgccaccagcatacccagactggtttccgcactataagtggtcagaaccagataaccttgcagccccaacaccattccgatgaacacgccagaaaccacaataatcagcatcgacaggacgccgacattatagagctggcgcaccagcagcggtgcatgtttgcgaaattccggtttgccgaccagcgcattgaataacattaacccggcccgcccgaacgttctcagggttttaatccctttatgtccgagcgacgccagcgcatttaacagcatgagtggcttaactccctggtaaaagatcagcgtgataatcgccggcaggatagcggaacggaacaggcccgtcagctatcccgtccagaaactgacgtacgcgcggatcaggattcgcctgcaacgcctgggcactgccatgagcgacaatttttttgtccgccaggatccaggcgtgatccgcaatacttaacacttccggcacatcgtgagaaaccaccacacaagtcacgcccagcgcgctgttcagctcagaaatcagcttcaccagcacgcccatggtaatgggatcttgcccaacaaagggctcatcaaacatgatgagatccggctccagcgcaatcgcacgtgccagcgctgcacgccgcgccatcccaccggaaagttcagaaggcataagtttagccgctccacgcagccccacggcctccagcttcatcatcaccgtactatgcaacaatggtgcgggaagttgggtatgttcccgcagtggataggcgacgttgtcaaatacgttcatatcagtgaacaacgccccggactgaaataacatgctcatccgtttgcgcactgtatacaggcgcgaacgagacatcgccggaatattctcaccatcgaaaaggatctcaccatgatctggtgcgatttgcccgccaatcagacggagtagcgtcgttttaccgatgcccgatggccccatgatcgccgtgatcttccctcgcggcacggtcagggaaatattatcgaagatgcagcgattgccacgcgtaaaactgacatcgcgcatatcgactaaattcgccacagactgctccataattcacccttcgtcttgcgttgattttctaagcatggcgctcaatttaaccttgaacccaacatatttacagaatattacctgccgtggttagcgaaagctggcatttgttttactttttagccgcataaagtcaaaattaagaatctgttacggctttctgaaaatcttcagcggaccggcgagtatacctgaagaaaggacgttagatgcttttagctacggcactgttaattgttggtttacttttggtcgtttacagtgccgaccgcctggtttttgccgcgtctattctttgccgaacctttggcatcccgccgctgatcatcggcatgacggtggtcagtattggtacatcgttaccagaaatcatcgtctcgcttgccgcgtctttgcacgaacaacgcgatttagccgttggtacagccctcggctcaaacattatcaatatattgctgatcctcggtctggctgcgctggttcgtccttttaccgtccattctgatgttctacgccgtgaattacccttaatgttgttggtcagcgtggtggccggttccgtactctatgacggacaacttagtcgcagcgatggtatctttctcctctttctggctgtgctatggctgctgttcattgttaaacttgcacgtcaggctgaacgtcaggggactgacagcctgaccagagagcagcttgcagagctgccgcgtgaaggtggattgcccgtcgcatttttatggctcggcatcgcactgatcattatgccagtggccacgcggatggtagttgataacgccacggtgctggcgaattactttgccattagcgagttgacgatgggtctgacggcaattgctatcggaaccagcctgccggaactggcaaccgcaatagcgggggttcgcaaaggtgaaaacgacattgcggtcggaaatatcattggcgcaaacatttttaatattgtcatcgtgttgggtttacccgcgctgataacgccaggagagattgatccactggcgtacagtcgtgactacagcgtgatgttgctggtgagcattatttttgcgttgctgtgctggcggcgctccccgcaaccgggccgtggtgtaggggtattattaactggcggatttatcgtatggctggcgatgttgtactggttatcgccaatactcgttgaataactggaaacgcattatgtcgcacgtagagttacaaccgggttttgactttcagcaagcaggtaaagaagtcctggcgattgaacgtgaatgcctggcggagcttgatcaatacatcaatcagaatttcacgcttgcctgtgaaaagatgttctggtgtaaagggaaagttgtcgtcatggggatggggaaatcggggcacatcgggcgcaaaatggcagcaacatttgccagcaccggtacaccttcatttttcgtccatcctggcgaagccgcgcatggtgatttaggcatggtcaccccacaggatgtggtgattgctatctctaactcaggtgaatccagcgaaatcacggccttaattccagtgcttaagcgtcttcacgtaccgttaatctgcatcaccggttgcccggagagcagcatggcgcgcgccgcagatgtgcatctgtgtgttaaagtagcgaaagaagcctgtccgttagggctggcaccgaccagcagcacaaccgccacgctggttatgggcgatgccctcgctgtcgcgctgttaaaagcacgcggctttactgctgaagattttgcgctctcacacccaggcggcgcactgggtcgtaaacttctgctgcgcgtaaacgatattatgcatacgggcgatgagatcccgcatgttaagaaaacggccagtctgcgtgacgcattgctggaagttacccgcaaaaatcttggtatgactgtcatttgcgatgacaatatgatgattgaaggcatctttaccgacggtgatttacgccgtgtcttcgatatgggcgtggatgttcgtcggttaagtattgccgatgtgatgacgccggggggaatacgcgtgcgcccaggcattctggccgttgaggcactgaacttaatgcagtcccgccatatcacctccgtgatggttgccgatggcgaccatttactcggtgtgttacatatgcatgatttactgcgtgcaggcgtagtgtaaagattcaaggataaacaacaatgagcaaagcaggtgcgtcgcttgcgacctgttacggccctgtcagcgccgacgttatggcaaaagcagagaacattcgtctgctgatcctcgacgttgatggcgtactgtcagatggcctgatttatatgggcaataacggcgaagagctgaaagcgttcaatgttcgtgacggttatggcattcgttgtgcgctcacctctgatattgaagtcgctatcattaccgggcgaaaggctaaactggtagaagatcgttgtgccacattggggatcactcacttgtatcaggggcagtcaaacaaactgatcgcctttagcgatctgctggaaaaactggcgattgccccggaaaatgtggcttatgtcggcgatgatctcatcgactggccggtaatggaaaaagtgggtttaagcgtcgccgtggccgatgcgcatccactgttgatcccgcgcgccgattacgtaacgcgcattgctggcggtcgtggcgcagtgcgagaagtttgcgacttattactcctggcgcagggcaaactggatgaagccaaagggcaatcgatatgagtaaagccagacgttgggttatcattgtgctatcactggcggttctggtgatgatcggcattaatatggccgaaaaagacgataccgcccaggtggtcgtcaacaacaatgatcccacctataaaagcgagcatacggacacgctcgtctataacccagaaggggcactaagctatcgattgattgctcaacacgttgaatattattccgatcaggccgtttcgtggtttacgcagccggtacttaccacgtttgataaggataaaatcccgacatggtccgtaaaagcagataaagccaagctgaccaatgaccggatgctctatttatatggacacgttgaagtcaatgcactcgtgccggactctcaacttcgcagaatcacgacggataacgcgcagatcaatctggtgacgcaggatgttacctctgaagacctcgtcacgttatacggaacaacatttaactccagcggtctgaaaatgcgcggcaacttacgcagcaagaacgccgagctgattgaaaaggttagaacatcctatgaaattcaaaacaaacaaactcagccttaatcttgtgcttgccagctcacttctggccgccagcattccggcatttgccgtaaccggagatactgatcagccgatccacattgaatcggaccagcaatctcttgatatgcaaggcaacgtggttacctttaccggcaatgtcatcgtcacccagggcaccatcaaaattaatgccgacaaagtggtcgttacccgtccgggcggcgaacaaggtaaagaagtgattgacggctacggtaaaccggcaacgttctaccagatgcaggacaacggtaaacccgttgaaggtcacgcttcccagatgcactacgaactggcaaaagattttgtcgttctgacgggtaatgcttatctgcagcaggtcgatagcaacattaagggcgataagatcacttacctggtgaaagagcagaaaatgcaggctttcagcgacaaaggcaagcgcgtaaccaccgttctggtgccgtcgcagctgcaggacaaaaacaataaaggccagaccccggcacagaagaagggtaattaattcgttatggcaacattaactgcaaagaaccttgcaaaagcctataaaggccgtcgcgtggtagaagacgtcagcctgaccgtcaactccggggaaattgtcggtctgctggggccaaacggtgccggtaagaccaccactttctacatggttgttggcattgtgccgcgcgatgcgggcaacatcattattgatgatgacgatatcagtctgctgcctctgcatgcacgcgcgcgccgcggtatcggctatctgccgcaggaagcctccattttccgtcgcctcagcgtttacgataacctgatggcggtactgcaaattcgtgacgacttgtctgctgaacaacgtgaagaccgcgcgaacgagctgatggaagagtttcacattgagcacctgcgtgacagcatggggcagtcactctccgggggtgaacgtcgccgtgtagaaattgcccgcgcactggctgcgaatccgaaatttattctgctcgacgaaccgtttgccggggttgacccgatctcggttatcgacattaaacgcatcattgagcacctgcgcgacagcggcctgggcgtactgatcactgaccacaacgtgcgtgaaacactggcggtttgtgaacgcgcttatatcgtcagtcaggggcatttgatcgcccacggcacgcctacagaaatcttacaagacgaacacgttaagcgtgtataccttggggaagacttcagactctgatagggtagaagtttgcgacgttttagcaggagagtacgattctgaacatgaagcaaggtttgcaactcaggcttagccaacaactggcgatgacgccacagctccaacaggcaattcgtctgttgcagttgtcgacgctggaacttcagcaggagctacagcaggcgctggagagcaatccgctgcttgagcaaatcgacactcatgaagaaatcgacacccgcgaaacgcaagacagtgaaacactggacaccgccgacgcgctcgaacaaaaagagatgccggaagagctgccgctcgatgccagttgggacaccatttacaccgctggtacaccatccggcaccagcggtgactacattgacgacgagctgccggtctatcagggcgaaacgacacagaccttacaggattacctgatgtggcaggtcgagttgacaccgttttccgacactgaccgcgctattgctacctctatcgtcgatgccgttgatgacaccggttatctgactgtcccgctggaagatattctcgaaagtatgggcgatgaagagattgacatcgacgaagttgaagccgtccttaagcggatccaacggtttgatccggtcggtgtggcggcaaaagatctgcgtgactgcctgctgatccaactctcccaattcgataagaccacgccatggctggaagaggccagactgatcattagcgatcatctcgatctattagccaatcacgacttccgcactttaatgcgcgtcacgcgtctgaaagaagatgtgctgaaagaagccgtcaatctgatccagtcgctcgatccgcgccccgggcagtcgatccagactggcgaacctgagtatgtcattccagatgtgctggtgcgtaagcataacggtcactggacggtagaactcaacagtgacagcattccgcgtctgcaaatcaaccagcactacgcctcgatgtgcaataacgcgcgcaacgatggtgatagccagtttatccgcagcaatctgcaggatgccaaatggttgatcaagagtctggaaagccgtaacgatacgctactgcgcgtgagtcgctgtatcgttgaacagcagcaagccttctttgagcaaggcgaagaatatatgaaaccgatggtactggccgatatcgcccaggccgtcgagatgcatgaatcgacgatatctcgcgtgaccacgcaaaaatacctgcatagtccacgaggcatttttgaactgaagtatttcttttccagtcacgtcaataccgagggcggcggcgaagcttcctccacggcgattcgtgcgctggtgaagaaattaatcgcggcggaaaacccagcgaaaccgttgagcgacagcaagttaacctctttgctgtcggaacaaggtatcatggtggctcgccgcactgttgcgaagtaccgagagtctttatccattccgccgtcaaaccagcgtaaacagctcgtttgacccaaccgataaggaagacactatgcagctcaacattaccggaaataacgtcgagatcaccgaggcactgcgcgaatttgttacagccaaatttgccaaacttgagcaatattttgaccgaatcaaccaggtctatgttgttctgaaagtggagaaagtcacccacacctcagatgcaacactgcatgtaaacggtggtgaaattcatgccagcgcggaaggtcaggacatgtacgctgccattgatggcttaattgataagctggcacgccagttgaccaaacataaagataaactgaaacaacactaattgtccgggcaattagcatgtgcatggcggcctgttgtgcggcacaacgggccatttgtacggttaatgccccgagcctgttccactgtttgagtgggcaggttcttaggtgaaattatgacaaataatgatacaactctacagcttagcagtgttcttaacagggaatgtacgcgaagccgcgtccactgtcagagcaaaaaacgcgccctggaaatcatcagcgagctggcagcgaaacaacttagcctggcgccccaggtggtttttgaagctatcctgacgcgggaaaaaatgggcagtaccggtatcggcaatggtattgccattccgcatggcaaactggaagaagatactctgcgcgccgttggcgttttcgttcagctcgaaacgcctatagctttcgatgccatcgacaaccaaccggtggacttactttttgccctgctggtgccggcagaccaaactaaaacgcacctgcatactctgtcgctggtagcgaaacgtctggcggacaaaaccatctgccgccgtttacgcgcagcccagagcgatgaagagctgtatcaaatcattacggataccgaaggtactccggatgaagcgtagttattcggtaatgtctcttttagacgttgtgaggagaaacagtacatggtactgatgatcgtcagcggacgttcaggttcaggtaaatctgtcgccctgcgtgcgctggaagatatgggtttttactgcgtggataaccttcccgtagtgttgttacccgatctggctcgaactctggccgatcgagagatttctgccgccgtcagcattgatgttcgtaatatgccggagtcaccagaaatattcgaacaggcgatgagtaacctgcctgacgctttctcaccgcaactactgttcctggatgccgaccgtaataccttaattcgtcgttacagtgacacgcgccgactgcatccgctttccagcaaaaacctgtcgctggaaagtgctatcgacaaagaaagcgatttgctggagcctctgcgttcgcgagcggatctgattgtcgacacctcagaaatgtccgttcacgagctggcagaaatgctgcgtacccgtctgctgggtaaacgtgaacgtgaactgaccatggtctttgagtctttcggcttcaaacacggtatccctatcgatgcagattacgtctttgacgtgcgcttcttgccgaacccgcactgggatccgaaactgcgtccaatgacaggtcttgataaacctgtcgccgcgttcctcgaccgccacacagaagtacacaattttatctaccagacgcgaagctatcttgagctatggttacctatgctggaaaccaacaaccgtagctacctgacggtcgccattggttgtaccggcgggaagcaccgttcggtgtatattgcagagcaactggcagactacttccgctcgcgcggtaaaaacgtccagtcacgccatcggacgctggaaaaacgtaaaccatgaccgtcaagcaaactgttgaaatcacaaacaagctgggcatgcatgcccggcctgcaatgaagctgtttgaattaatgcagggttttgacgctgaagtgctgttacgtaatgacgaaggcaccgaggctgaagccaacagcgttattgcgctgctgatgttggattctgccaaaggacggcagattgaagttgaagcgaccggtccacaggaagaggaagcactggccgccgttatcgccctctttaactctggttttgatgaagattaatcttcatcactttgacattcaaatcccttcaagctcccccggcaataagaaaagcgcgtactgaaatcgttatcaatcaacatcaattgtacatttcgtgcgctttttactttcagaagaaccttaagaaaaccttaagaagcattgtttagatttcgtttaagttaatcgaccatactggagatcgtcagaaaatatttccaggagatggcatgattcgcttatctgaacaaagtcccctgggcaccggaagacatcggaaatgttatgcgcatccggaagatgcccaacgctgtatcaagattgtctaccatcgtggcgatggtggcgataaagagatccgccgtgagttaaagtactacgcgcatcttggtcgccggttaaaagactggagtggaataccgcgctatcacggtaccattgagacggattgcggaaccggttatgtctacgatgtgattgccgatttcgacggcaagccttccattacgctgaccgaatttgcagaacaatgccgttacgaagaagacattgcacaactgcgccagttactgaaacagctgaagcgttatttgcaggataaccgtatcgtgacgatgtcgctgaagccgcagaatatcctctgtcaccgcatcagtgagtcagaggttacccccgtcgtctgcgacaacattggtgaaagcacattgattccactggcgacctggtcgaagtggtgttgtctgcgtaagcaagagcggttatggaaacgatttatcgcccaaccggcgctggctattgccctgcagaaagatctgcaacctcgtgagagcaaaacgctggccctcacttcgcgcgaagcttaatcaagctggtgttgttgcataaacggctcaccgcctaactgatacatctgccgtaaaatccacgcctgacggctacgcacgtagcccgatggcgcggagactttgaaacgaagtggattaggtaatacagctgccagcaatgcagcttccgaccgggtaagtttgctcgcgggtttgtggaaataacgttgtgccgcagcttcgacgccaaacacaccgtcgccaaattcggcgatattcaggtaaaccgtcaggatacgctttttgctccagactgtttctatccccagcgttaatccggcttccagcccttttcgaacccagctacgcccatcccataaaaagagatttttggctgtctgctgagaaatcgttgaagcaccgcgaatacggttttcattgcgctcgttgtgcgccagggcttgctcaatggaagcgacatcaaagccccagtgctcaggaaatttctgatcttctgcggcaatcaccgccagtcccatccacggcgagatttgatccatactgacccagtcagaatgtgccacgtaacgaaaattgccatgcagccaggcgctgacttgccgctcgaccattactgctgagaaaggaacaggcgcaacgctaaacaacgcgatgcccccgccccagaaaatggcgaggacaaccattaaccgcagaagaaaacggcgaacgaaactaaacaccgttaagcggcttttactcattcagccagaaccagcacgcgggaaaccagcttatcaatgccgctcgccgcttctgcaatgttctgcgccagcatatatgccggggtggtgacaatcttattgtcttcatcaaccacgatatcatcgacaggacacggcacatgctccgcgcccatctcttccagcacttctgcggtatcgatatcagtaccgatggtcaaacgcagcgggaaatcgaaaattttcggcagtatcgccggtgctatacacataaaaccaagcggttttccggcctgatgcatcgcttgtgccagcgcctttaattcacggtcaacggtgcattcgctaccaagactggcaaaattgcttaaattcttcgccgcgccaaaaccccccggcacaatcaacgcatccagttcagcggcatcggcctgggccagaggacggatttcaccgcgcgttattcgtgccgcttcaatcagcacattgcgcgtttccgtcatcgcttcaccagttaaatggttgataacatcaacctgctgcttatccggtgcaaagcagaccgcctgcgcaccgctgcgtgaaatagctaacaacgtcaacaccgcttcatgaatttcagaaccgtcatagacgccgcatccgctcagaattacgccaattttcttcattgtgatcttcctttcgcaattgactgaaacacattaatttttttaataaaaatgctacgcatcacacatttaactgattcatgtaacaaatcatttaagttttgctatcttaactgcgtgcggcctgaaaaacagtgctgtgcccttgtaactcatcataataatttacggcgcagccaagatttccctggtgttggcgcagtattcgcgcaccccggtctagccggggtcattttttagtggcttttgccacccacgctttcagtacttctacgtcgtgacgccactcttctttcatctcttcaatccattcaccgacgttatcttcccaggcgggaaggtcaggagactgaatttgctgacccagctgttgcagatggcgtaaccccactgaccccgccgcacctttaattttatgcccttcctcaacaatgccttttttatcctgcgccgtcagattcgactccagcacgctgacatagcccggcatcattctctcaaacaccgctaacccgtcggtgatcagcttcggtcctacaagttcgagatactgttccagcatgggaatatcgagcaatgcttctgatttactgttctcttctgtcgtcaccgtactctcctcatcatcctgggtatcccagaatttcttgatcatcgcggttagcgccggaacagaaagcggcttactcagcacatcatccattccagcattgaggtactcttgtttgtctttcagcacgttagcggttaaggccaccagcggcggtaaatcctcgcgcggataacgcttcgtcagtgcacgagagatatccaacccggtcatatctggcaactgaatatccagcaacaccaggtcgtattcgcccggtttaaacatctccagcgccgccttgccggtcatggcgacatcaacgctgttacctaacttttccagcacagagcgcgcgacaatcacgttcagttcaatgtcttccaccagcagcacattcagcgccggtaaaggcatatcgtcttcatcaaacgcatcatcaacctcttctgctaccgacggtgcgtggatcgtcaacgtaaaggttgaacctttgccctgttcgctggtaaccgtaatatcgccgcccatatttttcgccagacgacgagaaacggccagaccaataccggtgccggtggcaggtttaccgccatgactgtctttcacctggtaatacatggcaaagattttatccagctcatcctgcggaatgccgataccagagtcttccacttcaaaatgcagcatatcgccttcatcgtagcgcacgcgcacggtaacctggccttgctgagtgaatttgacggcgttactgatgaggttccacaagatctgccgtaaacgcgtcccgtcggtaatgacctgatgcggtaatggcagcgtcggctccagattaaagcgcaatcctttttgttgcgcctgcaatgcggagagattttccagatcggcaaggaagctggtgaaatcaaccggttgattatcaagctggaccttgcgccgttccatcttatccatgtcgataatatcgttgaagatattccccagcgtgacagccgaaacatggatggttttgagatatttttcctgctcggcggtgagttcagtatccagcagaatgcggctcaggccgacgataccgttcagcggtgtacgcaattcgtgactgatggtggagataaacgtcgttttgtcgcggctggcgcgttcaagcgcatcctgataccgcttacgctcggtaatgtcgcgaccaaagcccatcaaaccgtgacgtttacccacgcggtcgtagtacggtactttacggatttcaaagcaggctttgcgtccgtcgggataatccagccactgctcataggtcagtgacacattatgacggaacactttttcatcggtttcaatgactttcgcagcggcttccggtgagtaaacatcagcaggtttcaggtgaaccagttgtttttcgctttttccggtcagcagctccatcgcgcggttacagccggaaaactctttatcttcgttacgataaaaaaccaggtcgggtgaagcgtcaaggaaggaacgtaagaatgaggattgctgctcgagctgaatttgtgtctcttcgcgctctttgatttcaattttcagttggccgaaggtttcctgcagttctgcttccgctttttcacgaacggcgatttcctgatttagctgggcaatattatcttttaactgaacgttgaggctcaaatcgcgctcgcgcatctcctccagtttttgcaccagtcgtgacagacgttgtcgtgactcctccagttgctcgacgaccaccgatagaaagtagaccgcccacggcgtaatcagcaaaccaaagaagatagaacgaataacatcaatgctttcgacctggccatgcagcaccatggttaccgccatttgtaccacaatggcaagaacgacgagggccagcgccagcaacattgagaagcgcaccagacctaacttcatcatcaggtcaacataatactgcgccagcagacgaatttgcttcattagggaattccttcacgacaacctgccccaataatacccaattctgacagttacgttataaattgtgtgagaaatgcggaattcccctcaatggcctacgccgttggaggtagccacggacgtcccagcgccgatccctgtacgccatgttcattcagataacgatccagcccgaccattcccgtccatcgattttcgcaccacagcggagcaagcagcgtcgggcgacgggcgctggcggaaatgcgatggtagatcacttccggtggcgtatggcgaatcatttctccggcagtgagcgtgtaatcctccagttcaattccgttcaaacgccccgcttcccaggctttcgccataatgctgcctttcactatatgcagcggatgcagctttatgccgtccacgccggtttcaaccactcgctccagcgtttgcaaacattcagcctgcccttcgccaggcaggccaacaattaagtgagaacacaccttcagcccgcgctcacgcgccagctgcgtcgtgcgctgatagcaggcaaaatcatgaccgcgattgatgcgatgcagtgttttgtcgtgggcggtttgtagccccagctccaaccacacttcgtagccctggtccttatattcgcaaagcaaatccagcaccgcatccggcacgcagtccgggcgggtaccaacacacaaaccgacaatattggcctggctcaccgcctgctgatacatcgaacgcagcacctgaacttccgcaaaggtgctggtatacgcctgaaagtaggccagatagcgtttagcgcggttaactaaattcgcctggtgcgccagttgctcggcaatggaacgatgctgctgcgcttcatcggcaaacgaggcaacattacagaatgtgcagccgccacgcccgatggtaccgtcacggttagggcagctaaaaccgccgtgcagcgtcagcttatgcaccttttgcccataacgacgggtgagatcaccaccaaacatattgactaatttctgtaactgcataatctgatagaccgcgccttgaaaagaggccaaagcctgccatttttagcccaattcggcgatgacctggatcaatcgtcccggcctgcttttataaactgcataatcaatcaaaattaccgaaatttcatgcacaatcacataaatcacttttgcttatcttgtgtcagatttttttatctccttatggattttaggcaaaaacagtagcatgaaacgttattaccaattaaggcagtataaaatgctggttttctcgtcagttcaaggcaggataagggttaacacgcctttatgacagtcaggtattggctgtttctctaacgacgccccttttagccttaaatagaaaatccaatttaatttcagataattaataaagaattttgcgctaaagcacatttctgtaccaataagcttgccatttgacctgtatcagctttcccgataagttggaaatccgctggaagctttctggatgagcagcctgctcatcatatttatgcagtaattgagatcccctcttcaccgtattaaccgatgcgaaaaggacaacaagggggcgaatgcgaggtgcgcgtatgacacgcaaaccccgtcgccacgctcttactgtgcccgtgcgcagcggttcggaagtggggttcccgcagagcctgggggaggttcacgatatgttgtacgataaatcccttgagagggataactgtggtttcggcctgatcgcccacatagaaggcgaacctagccacaaggtagtgcgtactgcaatacacgcactggcccgcatgcagcaccgtggcgcgattctcgccgatggtaaaaccggtgacggttgcggcttgctgttacaaaaaccggatcgtttttttcgcatcgttgcgcaggagcgcggctggcgtttagcaaaaaactacgccgtcgggatgctcttcctgaataaagatcctgaactcgccgctgccgcacgccgcatcgttgaagaagagctgcaacgcgaaacgttgtcgattgtgggctggcgtgatgtccccactaacgaaggcgtgctgggtgaaatcgccctctcctctctgccacgcattgagcaaatttttgtgaacgccccggcaggctggcgtccgcgcgatatggagcgccgtctgtttatcgcccgccgccgcattgaaaagcgtctcgaagccgacaaagacttctacgtctgtagcctgtcgaatctggtcaatatttataaaggtctgtgtatgccggcggatctgccgcgcttctacctggacctcgctgacctgcgtctggaatcggccatctgcctgtttcaccagcgcttttccactaacaccgtaccgcgctggccgctggcgcagccattccgctacctcgcgcataacggtgaaatcaacaccatcaccggtaaccgccaatgggcgcgtgcgcgtacctataaattccagacgccgctgatccctgacctgcacgacgccgcgccgttcgtcaacgaaaccggctctgactccagttcgatggataacatgctggaactcctgctggcaggcgggatggatatcatccgtgccatgcgtctgttagtgccaccagcctggcagaacaacccggatatggacccggaactgcgtgccttctttgactttaactccatgcatatggagccgtgggatggcccggcagggatcgtgatgtccgatggccgtttcgccgcctgtaacctcgaccgtaacggtctgcgtccggcacgctacgtcatcaccaaagataaactgatcacctgcgcctctgaagtcggtatctgggattatcagcctgacgaagtggtcgaaaaaggccgcgtagggccaggcgaactgatggtgatcgacactcgcagtgggcgcattctacactcggcagaaaccgatgatgacctgaaaagccgccatccctataaagagtggatggagaaaaacgtccgccgtctggtaccgtttgaagatctgcccgatgaagaagtgggtagccgcgaactggacgacgacacgcttgccagctaccagaaacaatttaactacagcgcggaagagctggattcggtgatccgcgtactgggtgaaaacggtcaggaagcggtcggttcgatgggcgacgacaccccattcgccgtgctctccagccagccgcgcattatttacgactacttccgccagcagtttgctcaggtaaccaacccgccaatcgacccgctgcgcgaagcgcatgttatgtcgctcgccaccagcattggccgcgaaatgaacgtcttctgcgaagcagagggacaggcgcaccgtttaagctttaaatcgccgattctgctctactccgatttcaaacagctcacgacgatgaaagaggatcactaccgcgcagatacgctggatatcacctttgacgtcactaaaaccacgctcgaagcgacggtgaaagaactgtgtgacaaagccgaaaaaatggtacgtagcggcaccgtgctgctggtgctctccgaccggaatatcgctaaagatcgcctgccggttccggctccgatggcggttggcgcgatccagacccgtcttgtcgagcaaagcctgcgttgcgatgccaacatcatcgtagaaaccgccagcgcccgtgatccgcaccacttcgccgtgttgctgggcttcggtgcgacggctatttatccgtaccttgcctatgaaacgctgggccgcctggtagacacccacgcgattgccaaagattatcgtaccgtgatgctcaactaccgtaacggcatcaacaaaggcttgtacaaaatcatgtccaaaatgggcatctccaccatcgcctcttaccgctgctcgaaactgtttgaagcggtcggtctgcacgatgatgtcgtaggcctgtgcttccagggcgcggttagccgcattggcggggcgagctttgaagacttccagcaggatctgctgaatctgtcgaaacgtgcctggctggcgcgtaagcccatcagccagggcggcttgctgaaatacgtgcacggtggcgaataccacgcctacaacccggacgttgtgcgcacactgcaacaggcggtacaaagcggcgagtacagcgactatcaggaatacgcgaagctggttaatgagcgtccggcaaccacgctacgcgatctgctggcaattacgccgggtgaaaacgcggtcaacattgctgatgttgaaccggcaagcgaactgtttaaacgcttcgataccgccgcgatgtctatcggcgcgttaagcccggaagcccacgaggcgctggcggaagcgatgaacagcatcggcggtaactcaaactccggcgaaggcggtgaagacccggcgcgctatggcactaacaaagtgtcgcgcatcaagcaggtggcgtccggtcgcttcggcgttactccggcgtacctggtcaatgctgacgtgattcagattaaagtcgcccagggcgcgaagccgggcgaaggcggtcagttgccgggcgacaaagtcactccttacatcgccaaactgcgctattcggtgcccggagtgacgctgatctccccgccgccgcaccacgatatctactctatcgaggacttagcgcagctcattttcgacctcaagcaggttaacccgaaagcgatgatctccgtgaagctggtgtccgaaccgggcgtcggcaccatcgcgaccggcgtggcgaaagcttatgcggacttgatcaccatcgcaggctatgacggcggcaccggcgcaagtccgctttcatcggtgaaatacgcaggctgtccgtgggaactcggcctggtggaaacccaacaggcgctggttgccaacggtttacgtcataaaattcgtttgcaggttgatggcggcctgaaaacgggcgttgatatcatcaaagcggcgattctcggcgcagaaagcttcggcttcggcactggcccaatggtcgcgctcggttgtaaatatctgcgaatttgccacctgaacaactgcgccacgggtgtagcaactcaggatgacaaactgcgtaagaatcactatcacggcctgccattcaaggtgacgaattactttgaatttatcgcccgtgaaacccgcgagctgatggcacagctgggcgtaacacgtctggtggatctgattggtcgcaccgacctgctgaaagagctggacggtttcaccgccaaacagcagaaactggcgctgtcgaagctgctggaaactgccgagccacatgcaggtaaggcactctactgtaccgaaaacaacccgccgtttgataacggcctactgaacgcgcagttgctgcaacaggcaaaaccgtttgttgatgaacgccagagcaaaaccttctggttcgatatccgcaacaccgaccgttctgtcggcgcatcgctttcaggctatatcgcccagacgcacggcgatcaggggctggcagccgatccgatcaaagcgtacttcaacggcaccgcaggccagagcttcggcgtgtggaacgcgggcggcgtggaactgtacctgaccggtgatgccaacgactatgtcggtaaaggcatggcgggtggcttaatcgccattcgtcctccggttggctcagccttccgcagccatgaagcaagcattatcggcaacacctgcctgtatggcgcgaccggaggtcgtctgtatgccgcaggccgcgcgggtgaacgtttcggcgtgcgtaactccggtgctatcaccgtggtagaaggcattggcgacaacggctgtgaatatatgacgggcggtattgtctgtattctgggtaaaaccggcgttaacttcggcgcgggcatgaccggtggcttcgcttacgttctcgatgaaagcggcgatttccgcaaacgcgttaacccggaactggtcgaggtcttaagcgttgacgatttggcgatccatgaagagcatctgcgtggtcttatcaccgagcatgtgcagcataccggttcccagcgcggtgaagagattctggcgaactggtcaaccttcgccacgaaattcgcgctggttaaaccgaagtccagtgatgtaaaagcactgctgggtcaccgtagtcgtagcgcagcagagttgcgcgtgcaggcgcagtaaggggtagcaacaatgagtcagaatgtttatcaatttatcgacctgcagcgcgttgatccgccaaagaaaccgctgaagatccgcaaaattgagtttgttgaaatttacgagccgttttccgaaggccaggccaaagcgcaggctgaccgctgcctgtcgtgcggcaacccatactgcgagtggaaatgcccggtacacaactacatcccaaactggctgaagctcgccaatgaggggcgtatttttgaagcggcggaactgtcgcaccagacaaacaccctgccggaagtttgcggacgtgtctgcccgcaagaccgtctgtgcgaaggttcctgcaccctgaacgatgagttcggtgcggtgaccatcggcaacattgagcgttatatcaatgataaagcgttcgagatgggctggcgtccggatatgtccggcgtgaaacagaccggtaaaaaagtagcgattatcggcgcaggtccggcgggtctggcgtgcgcggatgtcctgacgcgcaacggcgtaaaagcgatcgtcttcgaccgtcacccggaaattggcggcttgctgaccttcggtattccggctttcaagctggaaaaagaggtaatgacgcgccgccgtgaaatcttcaccggcatgggtattgaattcaaactcaataccgaagtgggccgcgacgtgcagctggacgatctgctgagtgattacgatgccgtgttccttggcgtcgggacttatcagtcaatgcacggcgggctggaaaacgaagacgccgatggcgtgtacgcagcactgccgttccttatcgccaacaccaaacagttaatgggctttggtgaaacccgcgacgaaccgttcgtcagcatggaaggcaaacgcgtggtggtccttggcggtggcgacactgcgatggactgcgtgcgcacgtctgtacgccagggggcaaagcacgttacctgtgcctatcgtcgtgatgaagagaacatgccgggttcccgccgcgaagtgaaaaacgcgcgggaagaaggcgtagagttcaaattcaacgtccagccgctgggtatagaagtgaatggcaacggcaaagtcagcggcgtaaaaatggtgcgcacagaaatgggcgaaccggatgccaaaggccgtcgccgcgcggagattgtggcaggttccgaacatatcgttccggcagatgcggtgatcatggcgtttggtttccgtccacacaacatggaatggctggcaaaacacagcgtcgagctggattcgcaggggcgcattatcgccccggaagacaacgacaacgctttccagaccagcaacccgaaaatctttgctggcggcgatatcgtccgtggttccgatctggtggtgaccgctattgccgaaggtcgtaaggcggcagacggtattatgaactggctggaagtttaagcgaggtaacaataaattcgccagacagtgtctggcgaatttataaaacgagcgatccaactaaattttaagccattaaatcagccttaatcttcactaccacctttttaatctcaccaggttcgccaacaacgcatcccggtttatgcggttctcctggcataaacacggcgaacattcccggtttcaggatgatggcttgctcgttttcaatggcgctgcaaagctgataatcatcttcatggtggaactcttcacactgacgcgcagtgcctgccatgccaaacagaatccgttcctcaccgtttaataacagctggatatcaatgtattgttcgtgcaattcggcttttttctcaacaggcgattgagtattaaatgtcatgacattcataaagatattgtcgccctgtaattcgtaacggccaggcgctttttcttgcggtctggcagctaatgccaacgttaacgcgtcctgtaacgcaggatgtaatccggcagacggtaatgactgtacttcacccatcatcataatatttctccctgggccaacagcgcagccccaagtaaacctgcatcgtggcggtagtgcgccgccagtaaatcaacatgaaatgccgctggctcctgcgccagatacgtttccaccagcgccagatacccttctgccagaccaacgctgccaccgaccaccacgcactggcaatcagttgtggctttaatatcagcgatcagccttgcaagcgtacgtgcggagcggtgaatcagttgctgcgcctgctcatcaccctgcccggcgcgcgtgaaaatagttttcgcattcgcaccagccaactccccctgcgctgccgttgcaatgccgcgaccagaagcaatcgcttccacgcaacctgtgcgtccacagccgcagactggaccatgcggatcggcaagcgtatgcccgatatgccccgccagaccgccagggccggtacgcagtttaccgccgctcactacaccgccgccaacgccggtggaaacagtgataaacaccatatcggttatatcgccatccagcgcctgatactccgcccatgctgcggcctgcgcatcattaatggcaatggtcggcaaattggtaagttgctccagcgttttgactaacggaaagtgtaacaatccaccgagattatgcggattcagcgccagcaagctgccgtcgcgaataattccggttgaagcgatggcaacccgctgcgcatgtgcttgcaacggagagactaatgcggataaggcatcacgcagcgcctgcggagtctggctggcaggcgtaggaagttctcggcgatcgcggatctgcccgtcagcgccaatcagcgcggcggcaagtttagtaccgccgatatcaatcgccagtgtggtcatagcaccgcctttttcatcgctgtgttgtaccactgacaaatgtgttcaagacgcgtaatggcagaaccgaccgtcaccgcccacgcgccgtggcgcatcgcatccgccgcctgagcaggcgtgttgtaacgcccttcggcaatcacccggcatccggcgtcgctcaacgttttcaccagcgccagatccggctcttctggcgtttcaggcgtggtatagccagaaagcgtagtgccaataatttcggctcccagcttttggcatgccaggccgtcttccggcgttgagcagtcggtcatcgccagtaaaccgtgatggtgaatacgtgccagcagcgtttcaacaggtaccggacgcggtcggtcggtgccgtcaatggcgataatgtccgcgcccgcctgcgccagcgcatcaacatcttcaatataggccgtgatgcgtaccggagaatcctccagatcgcgcttcacaatcccgataatcggcacgctcaccaccgcacgcgtggcttgcagatttgccacaccttcaatacgaatggcgaccgcgcccgcctgctctgccgctaatgccatggcggcgacgatttcgggtttatcgagcgggctgtccggaaccggctggcaggagacaatcaggccaccgttagcagcgattttttgatccagttgtgcaagtaacgacatacatcttcccttagcgaaaggcccggtacagagaccgggcaacaggattaacttttggttttgactaaatcgtttttggcgctgccaaacggcacggcaccgctaaatggtttgccgtcgatagcgtcatgagtacgcaatgcttccgggcgcagccaacgctgaacacgagaaggcatatccaaaccaatcagcaggatcaccacaaacgttaaactaaacgagagcgagccaagtgccgttcccagatccagacgttgagcgatcaacgcgccgaggattggagctagtgcaccgcccagtgcgccaacgttgtaggtaaagcccagccccgctgcacgctggtcggtatcgaaataaccgccgatcagtttcggtaaaatccctgagatgccctgaccaagcatttgctggaagaacagtaacagaccgagcacccagacgtttgcgccgccaatcgcaaataccggaataatcagcagctgcgaggccagcagactacaaacgtacgctttgcgggttcccagccagtcaccgaggaagccaccgacgcagcaccccaccgccgcgccaaagccactaaagaacagcacattggcgacagtatgcgggtcataagccagatcggttttcagatacgttggcagcagcgcctgaatcggccatgagtagaggaaagcaaacaacacgaccaccatcagcattacgcccgttggccagcgtttgcccgtactttgcaccataaagctgataaagattgcggcgcataacagcccgagtacagcgacgatcgcggcattttgcaggttaccggcgaagcagaaccacagcgcagtagccgccgccagtgtcattacgatattggcaatgcgatgttcaccacggtagagaatgtctaccatcgtgcgtaccggtgctttacccccgtgtttctctttccagtcttccgcttccgggatgtttttacgcagccagagagcaaagatgattggcaaaatgccgataaagaacagcgcacgccagccccagaccggaaccaccaggctatagacctgagcggcaacgacggcccccactgagaagccggaaatcagaaaaccactggctttgttacgcagatgctttggccagctttcaatgacataggtggcgctggaaccgtattcacccgccatccccatgccgatgaccagacgagcgataaacatggtgatgtagcctggcgcaaagccgcaggccagcgtcccggccgagaagagaacgatgctggtgaccattgccagacgacgcccgtagcggtcacccatagcgccgagcatcaggccgccgaaccagcgagagataaaggctgcggagatcagacttgccgcctgcaccgtcgtgagcccgaattcaccctgtacttcggtgagtaccagggcgattaaaacgaaatcaaaaccgtcaagcagatatcccaaccaggcagcggaaaatgcccgccattgtgcgcggttaagatggcgataccacgggatattctgggttgtagtactcattgtgagtctcccgcggtgggcgatgcccacacgctttggtatgaaaattgtagggtacagatgcgtttatttcccctcacccggtaggggcgagcgaggggaaacaactcacccgcgctcttgcatcaactgctgggccagcgccttcagttctggcagatatttttcatctaccggaccaaacggtttgcggcacagcggcacagaaacgacatccatataatgcaggacagttttcaggccgcggaatacgccagttttgatcagtaaatcaatgactttgttgcactcagtttgcagtttctgcgcggtctggatatcgccttctttcagcgccttcacgatcccctgataacgccagcccatgatgttgtaagtgctgccgataccgccgtctgcgcccgccagaagaccagaggcgaagatttcgtcgtaaccgttatagagcaccagatcaggatgttcacgacggatctgctccatctgatagagatcgccagaggtctgtttcagcgcacctacaccaggcagcgtaaccagggtgttgatctgatccagggtcagttttaccccgctcagggctggaatgttgtacaccaccatcggcaacccatccgccgaatcaataattgcccgatagtgatcgcagtgttcttcaaagctgaaaggatagtagaacggcgtgacggcggagacggcatcgaagccataacgtttagccgatgccgcaagttgttggctttcggcggtgctgacgcaaccgacgtgggcgatgagtttaatcttacctttcgcctcttcagcgacgatttccagtacctgttcacgctctgaaaggctctgtacaaaggcttcgcctgtcgaaccccccacgtacaaaccgtcgatgccctgctgaatattgaactgaaccaggcggcgcagactcgctttatccagtgcttgttgttggtcaaaaggagtcaggagtgcagccattacgccacgtaaattcgttgccataaatacctctgaagtgatgcttgtctgataaacgatatacctttatacctgttataccagatcaattaagcaacaccccatacagaaagcttataatgcgatctgcttcactaaagtggcattatttctttttgttggtggtctgaccgaaggcgtgccaggtagcagagacgctgttgagatgcgattgcaacgcgcgatcggcttcgtcaggatcatgacggcggatcgcgtcaacgatcgcaatatgctgttgatagctaacgttgttatgctcatgcagagcctgatcggccacggttggacgtgcggcgattagccagtcgagcagggcaacgtggatcgccatgaagattgggttaccagggatctccgccagaacgcggtggaaatcaacgtctgagcgaatgaatgccgcgttgttatccagcgactgactgttgatttccagtgcttttgccagcaaatcgatttgctcatcggtggcgtgttcagccgcatagcgcaccaggctggattcaaagaacagacgtaattgttcgaaatgggcaatcccaccaggatgagaaaggaaatctttcgccatgccggaaagctcgccgatgatggtgtccgcagaaggacgtgagacgcgggcacgttcgccgttgtttatttgcaccagacctttgcgttttaacgctgccagcgcttcgcgcaccgaaggacgcccgacgttaaagaacgccatcagttcgcgttcagacggtaattgttcaccttcgccaaattcacgacggcggatcatctgttccagctcttcttccaccatttcggagagttttttacgcgccagcgggcggctgcgcaagttgcgcccgatagtggtagtagaatcttcagcttgcggatcaaatgcgttcataggactcattcaggaaaatgcgttagcggataataacgacgctatcgtagcacagtatcaaagtcaggcgaaaagatgacagatagcaaaacaggccacatgggcctgttttcattttacttcacaacgcgtaatgccggtcgaccaccgcgtggtggctgcggaggttcatcgtcaggatgagtttcatcatcgtgatctggcttgtcgccatcgataaccgacataacggtttcgttgtctgccgatgcctcttcatcattcatgatgctggcatcttcatcgtaggcagcttcaggctcaaacatcgtgcctgcaccattttcacgggcgtagatagccagcacggcagccagcggcacagaaacctgacgcggaatgccaccaaagcgcgcgttaaagcgcacctcatcattcgccagttccagattgccgacagcacgcggcgcaatgttgagtacgatttgcccgtcacgcgcatattccataggaacctgcacgcctgggagcgtcacatccaccaccaggtgcggcgtgagctggttatccagcaaccactcatagaatgcacgcagcagatagggacgacgtggtgttagctgtgacaaatccatacagattaactccggcccagacgcatttcacgttctgcttcagttaaagaagcaaggaaagagtcacgttcaaagacgcgggtcatatagcctttcagctctttcgcacccgggccgctgaactcgatgcccagttgcggcagacgccacagcagaggagcaaggtagcaatcgaccaggctgaactcatcgctcaggaagtacggcttctgaccgaagaccggcgcaatcgccagcagttcttcgcgcagttgcttacgtgcggcatcggcttcagaagctgaaccgttgatgatggtgttcatcagcgtgtaccagtctttttcgatgcgatgcatgtacagacggctttcaccgcgagctaccgggtaaacaggcatcagtggcggatgcgggaaacgctcatccagatattccataatgatgcgagattcccacagggtcagctcacgatccaccagggtcggaacgctctgattcgggttgaggtcaatcagatcctgaggcggattgtccttttccacgtgttcgatctcgaaacttacacctttctcagccagcacaatgcggacctgatggctatagatgtcagtaggaccggaaaacagcgtcattaccgaacgtttgttggcagcgacagccatgaaaacctccaggtatagtcagaatttttactgctaccagccaccaggtggccagtcagaagttgtgttacccagtaaggaacgactctctttgttcgaaaatcaaacaaaaaatgagcaatacccgacatttgggcagaaaattggatgatagtttaccagattttgcgacctttgtggtgagtcgatgccggaaatggggaaaaagagatgcgctttagtctgaaatagttgacttagtcccttattggcgatgtggtttttgttttacctgtctgtcaggtggcagcaaaaagcaactttccattttttacgctgatgcagattttagccataaaaaaacccgccgaagcgggttttttcgcaaattgttttctgccggagcagaagccaattaacgtttggagaactgcggacgacgacgtgctttacgcagaccgactttcttacgttcaacctgacgagcgtcacgagtaacgaagccagctttacgcagttcagaacgcagggactcgtcgtattccatcagagcgcgggtgataccgtgacggatcgcaccagcctgaccagagataccaccacctttaacggtgatgtacaggtccagtttctcaaccatgtcgaccagttccagcggctgacgaactaccatgcgagcagtttcacgaccgaagtactgttccagagaacgttggttgattacgattttaccgttgcccggtttgatgaaaacgcgagctgcggaacttttgcggcgaccagtgccgtagtattgattttcagccattgcctataatcccgattagatgtcaagaacttgcggttgctgtgccgcgtggttgtgctcgttacccgcgtaaactttcagtttacggaacatagcacgacccagcgggccttttggcaacatgcctttaaccgcgatttcaatcacacgctcaggacggcgagcaatcatctcttcaaaggtcgcttgtttgataccaccgatgtggccggtgtggtgatagtacactttgtcagtacgcttgttgccggttacagcaactttgtcagcgttcagaacgatgatgtaatcaccggtatctacgtgcggagtgtattccgctttgtgcttaccgcgcaggcgacgagccagttcagtagccagacggcccagagttttaccggtcgcgtcaacaacataccagtcgcgttttacggtttctggtttagctgtaaaagttttcattaaaagcttacccaataaatagttacacgttggtgaacacccaaacgtcttcaattgttgaggttcacacgacaaagtccggcaaacctaccccttcgaatagcctatgccagcacacaaaaagtttcgggaaaaaaaactttcttgtaacgtggggtcgcaggattatagagaagtcggggtcaaagatcgacccctttttgtgatttgtggcaggttttaccccgccaaatgctcgcgcttcaaatactcttcgctttgcatctcttgcagacgtgacaggcaacgctggaactcaaacttcagccgctcgccctgataaatttcatacagcggcacttctgcactcaccactaatttgacatggcgctcgtaaaactcatccaccagcgcaataaagcgccgcgcttcgctctccatcaaccgcgtcataactggtacatcaaacaacatgaccgtgtgaaagaggcgtgagagcgcaatatagtcatgctgactgcgggcatcgacgcacaaggtagtaaaagaaaccgccagcgtctggttctcgacgcccattgtcgccaatggccgatggttgatttctaacgtcggtgaattttctcgtttcgcccccgccagcgccaaccatagtttatccatttgcgtccgggtttcatcgttgagtggcgaaagccacagatgcgcctgagtgagtgtacgcagtcgataatcaacaccagcgtccacgttcattacatcacaatgctgtttaatggcatcgattgcaggcaaaaaacgcgcacgttgcaggccatttcgataaagttcgtccggcggaatatttgacgtcgctaccagggtaataccacgggcgaacagggctttcatcagaccgccaagtagcatggcatcggtaatatcagaaacaaaaaattcgtcaaaacagagcacgtcagtttctgctttaaagcgatcggcaataatttccagcggatcgctttggccttgtaattcggtcagctcatcgtgcacccgcagcataaaacgatgaaagtgcaggcgctgtttccgctctcccggcagactttgatagaaaaggtccatcagccaggttttcccgcgtcctacaccgccccacatatataagccacgcactggcatatgctttgtgtcttcgcgtttaccccacagcttaccgacccgcgccattagcccactcgtcctgggggctggtggcgtgctattgatgagttcctgataaataatttccaggcggctgacggcctctttttgaacgtcgtcgtgttgatggctgccttcattgagcgccttcaggtattgcgatgttggggtaacgctttgcatgatcttattgttattccttgaataatcggtgcgccgttgttcacggttgacgaaaaaaaggccgttctacactacgcgatatgcagtcgggattccacttctgtggaattaacggttatagtggcataatcagccgcaggcatggagcctgaagccaacaccctacggaaacaaaagacaacgggagatgttcatgacctgggaatatgcgctaattgggttagtcgtcggcatcattattggtgctgtggccatgcgttttggtaatcgtaaactacgccagcaacaggcgttgcagtacgaactggaaaagaataaagctgaactggacgagtatcgcgaagagctggttagtcactttgcccgcagcgcggaattactggataccatggcgcacgactatcgccagctgtatcagcacatggcgaaaagctccagtagcctgctgccggaactgtctgcggaagcaaacccgttccgtaatcgtctggcagagtctgaagccagcaacgatcaggcaccggtgcagatgcctcgcgactattctgaaggcgcatccggcctgctgcgtactggcgcgaagcgcgactaatttatttttcgggcgcagccattgcgccctcctcttctctccctccccgactatcatttaatctggtgtctcattgttagccgtctgaaaattcaataacatcaaactgttttgaatctcttttcttatcattcaggtacgagagcaggaataatgaaaaaacaaacccagctgttgagtgcattagcgttaagtgtcgggttaactctctcggcgtcatttcaggccgtcgcgtcgattccaggccaggttgccgatcaggcccccctccccagtctggctccaatgctggaaaaagtgcttccggcagtggtgagcgtacgggtggaaggaacggccagtcagggacagaaaatcccggaagaattcaaaaagttttttggtgatgatttaccggatcaacctgcacaacccttcgaaggtttaggctccggtgtcatcatcaacgccaataaaggctatgtgctgaccaacaaccatgtgattaatcaggcacagaaaatcagtattcagctcaatgatgggcgcgagtttgatgcaaaactgattggtagcgatgaccagagcgatatcgccctgttgcaaattcaaaacccgagcaaattaacgcaaatcgctattgccgactccgataaattgcgcgtcggtgattttgccgtggcggtcggtaacccatttggccttgggcaaaccgccacctctggcattatatccgcattaggccgcagcgggttgaatcttgaaggtctggaaaactttatccagacagatgcttccattaaccgcggtaactccggcggtgcactgttaaaccttaacggtgagttaattggcatcaacactgcaatccttgcgcctggaggcggtagcgtcgggattggatttgccattcccagtaatatggcgcgaacactggcgcagcagcttatcgactttggagaaatcaaacgcggcctgttaggcatcaaaggcaccgagatgagtgccgatatcgccaaagccttcaaccttgacgtgcagcgtggcgcgtttgtcagcgaagtgttgccaggttctggctcggcaaaagcgggcgtcaaagcgggcgatattattaccagcctcaacggcaaaccgctgaatagctttgctgagttgcgctctcgtatcgcgaccaccgagccgggcacaaaagtgaagcttggcctgctgcgtaacggcaaaccactggaagtagaagtgacgctcgataccagcacctcttcgtcggccagcgctgaaatgatcacgccagcgctggaaggtgcaacgttgagcgatggtcagctaaaagatggtggcaaaggtattaagatcgatgaggttgtcaaaggaagcccagctgctcaggctggcttgcaaaaagacgatgtgatcattggcgtcaaccgcgatcgggtgaactcgattgctgaaatgcgtaaagtgctggcggcaaaaccggccatcattgccctgcaaattgtacgcggcaatgaaagcctctacctactaatgcgttaatgtcgtaaaccgggcatcaggctgacgtgtgatgtccggttaactcgtggtatgctgctgccgttcccttttttaacgatgcctccatcatgtttgtgaagctcttacgttccgttgcgattggattaattgtcggcgctattctgctggttgccatgccttcgctgcgcagccttaacccgctttccactccgcaatttgacagtaccgatgagacgcctgccagctataatctggcggttcgccgcgccgcgccagcggtggttaacgtttataaccgcggtttgaacaccaactctcacaaccagcttgagatccgcaccctgggatctggtgtaatcatggatcaacgcgggtatatcatcaccaataaacacgtgatcaacgacgccgatcagatcatcgtcgccttacaggatggacgtgtttttgaagcgttactggttggctctgactctctaaccgatctggcggtgctgaaaattaacgccacaggcggtttaccaacgattccgatcaatccacgccgcgtaccgcacattggcgatgtggttctggcgatcggtaacccgtacaacctcgggcagaccattacccaggggattatcagtgccacgggtcgaatcggtctgaacccgaccgggcggcaaaacttcctgcaaaccgatgcttccattaaccacggtaactctggcggcgcgctggtgaactcgctgggcgaactgatgggcattaacacgctgtcgtttgataagagtaacgatggcgaaacgccggaaggtatcggctttgcgattcctttccagttagcgaccaaaattatggataaactgatccgtgatggccgtgtgatccgtggctacattggcattggtggacgtgagatcgccccattacatgcgcagagtggcggcatggatcaactgcaagggatcgtggttaacgaagtgtcgcctgatggcccagcggcaaatgcaggcatccaggtcaacgatctgattatctctgtgaataacaaacccgctatttccgccctggagacaatggatcaggtcgcggaaattcgccctggttcggtgatcccggttgtcgtgatgcgtgacgataaacagttaacattgcaggtcaccattcaggaatatccggcgaccaactaaggtcagcgtaaaaaaacaaaaaccggagtctgtgctccggttttttattatccgctaatcaattacttattaacgaactcttcgcccagggcgatatctttcttcagcgtatccagcataccttccagcgcgttctgttcaaatgcgctcagagtaccgatagatttacgctcttccacgccgtttttacccagcagcagcggttgagagaagaaacgagcgtactgaccgtcgccttcaacgtaggcacattcgacaacgccttgttcgccctgcagtgcgcgaaccagagacagaccaaaacgtgcagctgcctggcccatagacagggttgcagacccgccaccggctttcgcttcaaccacctcagtacccgcgttctggatacgtttggtcagatcagccacttcctgctcggtaaaactaacgccaggaacctgtgacagcagcggcagaatggtaacaccagagtgaccaccaataaccggcacttcaacttcgcctggctgtttgcctttcagttccgcaacaaaggtgttggaacgaatgatatccagcgtggtaacgccgaacagtttgtttttgtcataaacaccggcttttttcagcacttcagcagcaatcgcaactgtagtgttaaccgggttagtgataataccaatgcacgctttcgggcaggttttcgcaacttgctgtaccaggtttttcacgatgccggcgttaacgttaaacaggtcggaacgatccatacccggtttacgcgctacgcctgcagagataagaacgacatctgcaccttccagcgccggagtcgcatcttcacctgaaaaacctttgattttcacagcagtagggatatggctcagatcgacagccacaccgggagtcactggagcgatatcatacagagagagttctgaacctgaaggcagttgggtttttaacagtagtgcaagcgcctggccaataccgccagcagcgccgaggactgcgactttcatcctaaactccttattatattgataaactaagatatgttgctccgctgccgcgaccttaatccacaaaattgccgtttacaatgaccacatatcaagaatgtgtagtcacgcaagtttagcgtttatgcatttaattgccgtaatcaggaacctaacttacgtaattaacagtcacttatgcattagcgcaacattccaacaggtggtgacaatataccctaccgctcagccaaaacaatatcaatttgataacaattaatttacttttaagcagaatttgcaggccgtgacgcaggcatgtttctcaataacgaaatttgataaaatcccgctctttcataacattatttcagccttcttcagggctgactgtttgcataaaaattcatctgtatgcacaataatgttgtatcaaccaccatatcgggtgacttatgcgaagctcggctaagcaagaagaactagttaaagcatttaaagcattacttaaagaagagaaatttagctcccagggcgaaatcgtcgccgcgttgcaggagcaaggctttgacaatattaatcagtctaaagtctcgcggatgttgaccaagtttggtgctgtacgtacacgcaatgccaaaatggaaatggtttactgcctgccagctgaactgggtgtaccaaccacctccagtccattgaagaatctggtactggatatcgactacaacgatgcagttgtcgtgattcataccagccctggtgcggcgcagttaattgctcgcctgctggactcactgggcaaagcagaaggtattctgggcaccatcgctggcgatgacaccatctttactacccctgctaacggtttcaccgtcaaagagctgtacgaagcgattttagagctgttcgaccaggagctttaatctctgccccgtcgcttctggcggcggggaaaatgttgcttttgcctatcaaccccctgctttcccctgcgattcatttaacgaatagtgcgttttactgcgacatatcattcacacaatgaatacatatagtaaaaaagcacattatgcaaaattcattatctaattgaaaatactataattaacaataaatgatcgtgtttttaattcttttttgttattaaaattcacatttttaacacttagtatcaactgaaacagttagcgtggtattaattagttcaataattagtgtatacttgattttgtgatatgggtcacgaaacaaaggcccagctaaaagattatgtcgaggtaaaaatcatgaaaatcaaaaccactgttgctgcattaagtgtgctttctgttctctctttcggtgcattcgctgccgactccattgatgctgcacaagcacaaaatcgtgaagcaatcgggaccgtatccgtaagtggtgtggcgtcttcgccaatggatatgcgtgaaatgctgaacaaaaaagcggaagagaaaggcgcaacggcctaccagattactgaagctcgtagtggtgacacctggcacgctacggctgaactgtacaaataaaccctcatcgtcttgtccgacgatattgcccccggttcgggggctttttttgcgctaatgacgaacattaaaacgcaaatgcccttccagttcttcctctgcctcatcaaacagcaatattaacgcgccaaaacggcgacgcgttttctctcccagatgaacaaattcaatctcaagtggtagcggcaggacatcgttcattaacacatcccatagtgagtcgagatcgcgtaccttatctttcgccagaccaaaggtttggctaaagtcacgataaaaatcctcctgactctcaatctcatcaaaatcaaaggtataaatattcatctgttgccaccgtcacgtttcgcggcgagttctgccgttcatcgctaagtatagccatgaaaaaaccgacgcttcaggcgtcggttttgacttaactatcggtcaacgcatgttgatacttatggagcatacccgtaagccgatgtactggttccgtcacctgcggtggcgcttgccagatgcgtagcttttcctggtcaatttccagttcttccagcaactggccaaagtaccgacgacgtttatcatcgctacgggcagatatcacatggtctgctgtgcggcgcatttgtcggtgaaacgccgataaatcctcgttaaccggaatcggcgcatcacgcaggcgctggtgcgcgataatcatcgtcagcgccaggcgaaatttcggcaaatcccctgggaacttattcatcagcaaaaacagctgctgataaagtgccgggaggtgattctctttacgacgtgccacattggtagtcatcgcggaaacagcggcagaaacaaactgattaagcagtacacgtccagtcctgtcgcgcgatttatcccgcaccagcaaaataacggtgaacgcgagcacacagccgacgatttgccctaatgcgctgtcgagaaactgactgaaatggaaagtcatcgggttatccagcacgataatgtttatggtgctggccaacgcccccatcgagcccaatctccgtttctgtacttctataccgaggaagaatcccagcactgccaggctaatacacagcagcaacatgctctgttgggtattagggataatcaccaaaaagtagagcagccctaacggtagcgctgccagcgtcccgtagataaagtcgatcgccaccatgcgtggattcggcaaacgcattgccagtgacgtcactaccgcaatcatcaccattgcaccactgccggaagtccagcccgtccacagccagaaaagcgtgcccagaatgcaagaaagtgtggttcgccagaagttaaccattgcatgatgacgttcggctgactctacttttacttccggttcgccttgcaggatctcttcttcggtggcgttgatttttgtgttactgataacgccgcgcttgagaagctgataacgcgttgccgccgcgacccagctataaatggtgacaggcgtttcccgttccccggtccaggcgataactctccgcaggcgtttgagctgcttgtggacgtcctgcgcagtttctaccggtgtgtcaaaaaattcgcgaaaagtatcagtgatcaattccgggcgcgtattctgaataagataagtttcgcaggattgggtaatcagcgtcagcgatagcgtattgatcgcttttaaacgtcgattggcccgcgcccagcgggaagattccatattcaggttgctgcgcataccttgtaacgccgtagtacgtcgcaccagatcgccccaggctttatcgacaacttcaccatcgccatgcttgatacagagttgcattaattgatattgcgcgaccagcaaactttccagctctcgatccacttcttgtttgatcgatcgcggagaaaagagcaaatccgccataattgcacacacaataccgataacgatctcgctacaacgttcgacggcaaactgcggcgtaagcaatggttccggctgaatggtgatcacaatgatcagcgcggtataaccggccagcccccacgcatacgagttttctattcgtaccagcgaggatatccaggtacaaaaaccggcccagatacagcacaccagaatcatcaataatggtgctcggatcatcgcaatgatgattaccagtccggcaatacagccaataaatgtgccgatgatgcgcaaaaagccacgatagcgaatagcgccagaatacggttcacctcccgcagcaaaggccggaccggcggcaacaatcgccgctgtcagtaccgcccagcgtggcgtttccagctggaagtgaaagccaacaaacagcgccagtacaatggcggtcgccagttttaccgcaaagcgaatatgttgattagcaatggagaaaatacccatcgtgattaaccaaactcacgcaggcgatgagccattttacggaagaacgaatcctgactttcgtcgcgatcttgtttgccagtgactaccaccgtagcagtggtgcccgcaggccagatgttctcttgctggttgtcgagacgaatacgtaccggaacacgttgcgccaaacgtacccattcaaggttagagtcgatggtcgccatccctttgtcgtcacgcgtgctgctggcattggtgacccctgcggcaacactatcaacagtccctttcagcactttgttactgccaagcggcgtgatctccgcacgatacccagggcgcaccccttccagcttagtttcttccatataggccagtacatagaaggagttctgtttcaccagcgcaaccgccgttgatcctcgagtaataaactcaccggtatagacgttgaggttggtcacccagccatctgctggcgcgcggatgactgtacgttcaagatccagttttgccagatcgcgggtcgcctgcgctttcgctaactgatgcagaactgtttgtagtacgttgttggcctggtcgatctcttcgcgagacatcgcctgcacaccgagacggttacgacgtccggcctcctggcgtttctcctgcgccagtacctgataataagcaacatcggcttgcgcttcctcaagcgccttttgataacgcggctggtcgatggtgaacagtacctgtccttttttcaccagctggttatcatgaacattcacctgggtaatgagtccagaaacgtccggcgcgatcgcaacgacgtcagcgctaaagcgcgcgtcacgcgtccacggggattcggtgtaatagacccaggcattaaaaattgcgatgaaggccagaatgactaatacgaccgtgatggccgtacgggagaattttcttattagtgttttcacttcaacctcaaacgaacagtcgcgatatcaaataaaacaagcagcaatagagcgcggtgttgaacaacgccggatgccagacaaagtcgtaaatacctgttggcacaagtacccggcgcaccagccagaaaatcgccagtgataaaagcaattcgaaaaatatcggtgggaaggacagcccaaacaccacgataacgggaaacagactcatgttgaccttggttgtatagagagagcaggcgttattattttcagcatctgtcgccgcagagaagggcatggaaagccgggcgagagcaacattgctgtagattgatatttaatatattaacgtaactgttatgctgttatctatattatgtgatctaaatcacttttaagtcagagtgaataatggaacgactaaaacgcatgtcggtgtttgccaaagtagttgaatttggctcttttaccgccgccgccagacagctacagatgagcgtttcgtccatcagtcagacggtgtcaaaactggaagatgagttacaggtaaagctgttaaaccgtagtacacgcagcattggcctgactgaagccggcagaatttactaccagggctgccgtcggatgctccatgaagtgcaggatgttcatgagcaactgtatgccttcaataacacccccatcgggacgctgcgcattggctgttcttcaactatggcacaaaatgttctcgccgggctgacggcaaaaatgctgaaagaatacccaggtttgagtgtcaatctggttaccggaattcctgcccccgacctgattgccgacggtctggatgtggtgatccgcgtcggcgcgttgcaagattccagcctgttttcccgccgtctgggcgcgatgccaatggtggtgtgcgccgcaaaaagctatctcacacaatacggcataccagaaaaacccgccgatttaagtagtcattcatggcttgaatacagcgtgcgacccgacaatgaatttgaactgatcgcaccggaagggatctcgactcgcctgatcccgcaagggagatttgtgactaatgatccgatgacgctggtgcgctggctgactgcaggcgctgggatcgcctacgtgccgttgatgtgggtgatcaacgagatcaatcgcggggaactggagatcctgctgccacgttaccagtcagacccacgcccggtttatgcgttatataccgaaaaagataagctgccgctgaaggtacaagtcgtgatcaactcgctaacggattattttgttgaggtcggtaaattgtttcaggagatgcacgggcgcgggaaagagaagtaattaatattgtactgttacgttgtacaaacctgtgccaacgggttcccctcaccctaaccccagaggggcgaggggaccgttcgtacacggagaaggattaattatccttctgaaaatactgaaattattacgcagtaccgccaacagtcaggttatcaactttcagcgttggctggcccacgccaaccggcaaactttgcccttctttaccgcagacacccacgccgttatccagtttcaggtcgttgccaaccatcgaaatctgctgcatggtttcgataccggaaccaatcaacgttgcgcctttcaccggcttagttactttaccgttttcaataagatacgcttctgaggtggagaaaacgaatttgccggaggtgatatccacctggccgccaccaaagttcggtgcatagataccgtactcaacggattcaataatttcctgcggggtcgatttacccggcagcatataggtgttggtcatacgcggcatgggcagatgagcgtaggattcacggcgaccgttgccagtcggcgtcatccccatcaaacgcgcgttgagtttatcctgcatgtagcctttcagaatgccgttctcaatcagcacgttgtactggcctggcgtaccttcgtcatcaatcgccaccgaaccacggcgatcgaccatcgtgccatcatcaaccacggtacacagttctgaagccaccaactccccgacctgtccactaaatactgaagtgccacggcggttgaagtcgccttccagaccgtgacccaccgcttcatgcaacagcacgcccggccaacctgcgccaagtactaccggcatggtgcccgctggtgcagcaacggcagaaagattgaccagcgccatacgcactgcttcttttgcccacgcatccgcacggacttcgccgtcgagatcagcaaggaagaactcataaccaaaacgaccgccgccaccactggcaccgcgttcgcgtttgccatcttcttcgaccaaaacgctcacggaaagacgcaccagcggacgaacatccgccgctagtgtgccgtcggtggccgcaaccagaattaattcatagacaccactgaggctggcagtcacttcctgtacgcgcttgtccgcttcgcgggcaaccttatcgacgcgacgcagaatatccaacttctcttcacggctcatgctttgcagcggatctaccgaggtatataacgggctatgctctaccgcgcccagcgtctgtactttgccatcaccactatcacggacgatggtgcgcgccgcttgtgcactctgttccagcgccagcaggctgatttggtcagcataagcaaatccggttttttcaccactgattgcacgcacgccaacgccctgatcgatgttgtaagaaccatctttaataatacggtcttctaaaacccaggattcgtgatagctcgactgaaaatagagatcgccataatcaaggcgacgttcggccagttgaccgaggatcgcgaacaagtcctgatgtttcaggccgttcgccgctagcaattgttcacttaccaggttcagactcatcgtttttgctactcgttagttactgcagtagaggattttttacggctgccggatgcggcgtgaacgccctgtccggcctacggttatgttctggctcgttggcctttggcaacgattatcatatgagattggggcaattacgcgccctcgtcaaatcattgcgctttttctttgcgcggttgtcgcaacacttcgttgatttgcggatcgtccagcggacccgaaatgtgatagcgcaaaatggagactttgctccacagcggtcccagcactttactggcggcaaacactgccgcgccaacaatggggttaaccgcaaaggccgcagccacgcccaccgtcgcagaaatctctggtgcgacaaccgcttccatattcaggtcgcgacgtaccagatttaccgaccctttcatagcgatgtccgcttccaggccatccaccagcgtgtcgtcggtgtgcataacgccgtctttaatccacgcggtgctgcgaatggagtcaaaatagaacccttcgccaaaagtgtctctgaaatcaaaacgcagcttacgcatcagggcatctacgctcaataagcgcagcaattgcccggcatgtccggtattgatttcggtaatttcgcctttacccagttgagtatgaatgatgccattcaacgtcacctcatctggctgccagggtgctttgcgccagtgtaaatcgtaatccacattaaatgacgactggcgtatgggcgtcgtgacaccaaaaaattctgcggcggcatcaattttctgcccgcgcagttttcctttcagcgaggttcgttcattccccggattgttaacccattcaccatcggcagtgagccgcgcaaaaccagtatcaatcagtccattagtcagcgttaacgtatcgccagaaatggtgatatcactgtcaatgcgaccgaatttttgcccccagaaccagcactctgcgcatcgtatttgtgcgtctggccagccacggaagttaatgcgttccgttgtcgggaaaggtgatgactgtgttgaatcaccacgagttttcgccacgcttgggttgtaataaagatatttgatattcgccagccacggtgcgttattacgcatcgccagcgtggcgttgatttcacgcccttgcgcctcaaccagggtgccatttgccgtcggttgcgaaacaatactcaggttattccattgctgatttcccagcgacaacataggcgtacgtaacgttatgtgttgtgggaaactcgctgcaccaccgacactctccgccgcgcctttctggaacagggccagccactcggcaccattcatcggcggcatattgagttcaacgccactttgttccggcaacggcgggagcgttttactgtctgccgcccaaatagcacgatcgagcgtcagcttttgaccgagcaaccagcagctattgaaatggttatccgcaccagcctgtccggttaattcaaagctgttgagattgccatcaaccttaacgtttaccggtagtggttcacccgcaggtttggctaacggtgaaggtaagtgactgctcacattcttcagatcgccgttcagctctacgttatacgtcgcgccagcatgataaggcagctcaatgcccactttaccatcccacgccacgctgccacttaatgcttcgttcaccgctgcaggcagaaagccggttttcgctggttgccagttaccgttgagattcaccgcgacctggtaggcttttgccccttctttggtggaaaaatccacgttcaacggctgattaaaccagcttgctgtcagtggttcactttgcagatcgccattgataaagctgaatttaccgctcaaatttttcagggtgctgtcgagtggtttgataaacagactgttattacgcagcgtcacttcacctttcgcggttaccaactcgccgttcagcgggatatcaagatgtaagcgagcattcacatcgccgtcgagctggagttcttgcagggtcgcacccagggaatctttcagcggtgtctcatcaaagtaagggccaacggctttacccggacctttaatgtcagcgtcaatcagcagtttttcttttgagtagtcagggagcactgcggtgagattactcgcgcgcacgccgcccagattaacgccatcggttttcatccataaaccgtcgttaataaagtccagttcaatatcaaggttagttaatgcaggccagtccggctggaaggcaaacttcgcgttgcgcagcggcaccagcacttcaaactgaccttcgttgtgtttataggggaagagttgcggattgccaccataaaccagcgtcgcgttatccgcttcaccgccctgaatcgcgccacttaagtaatcaaccaggtctttacccatcaagttttccgggaaatagcgccaggcttgtgaaccatcatcggtactgatgccagccagaatacccagccagggttcatcgttagcaggttgcaggtaacgaaaaccgccgcgcgcatggacggctttggctttaacgtcaatattacgcccatccagctggaaacctttgtcattgttcagccagcttatcgttgcctggccgtcggcgatttccagtggcgcacggaataccgtttcgtaaggcatctttgcctgcttcatcgacgcagtaagcaaaccattttctacgctgccggaaagcgtcccggagaagtgttccgcacccggtaataatttccattgcttccaggccagatcgctccacgatgcctgaaaacgggtcttgtctgccgcctgaagcgggatatccagcgccagagtgttaatcttgccgctcggttgtgtggagcgccaaacatcacccagtgcaggtgaaagtttcgcgaccagcgggcgtacgccctccaggcctgccagctccagattactggcacgaatccggagttcgtcactgcgtttattgtctttgccgccaacgtcctgttccggtatccaggccagcgtcaatgctccgctcggccagggtttgccgtccatcgtgatccgtgtatcgggaatagagaactgccatcccggattttcacgcgtaatatgcgcagtcagattatccaccgacagcgtatgtgtttccttctcgcccaaccagctggcaccgccctgtttcagccagacgtcaccgccggttacatcgcctttgtcgatcgtcatccagccttcaagggagaactgtgccgtttccagcgcaatattgtcctgcatccatttaccgagccacggcttcaggtcgatgtcatccgcctggagccagacgcgaccattgcttaacaacccctcatcatcgcgcaaatccatacgcacctgcatcacgccgtgctgtccggtaaggctggagaggcttaccaggccttccgcacggtgtcgacgtggatcgttcagccaggtgagctgtgggatcgccagctcggcgcgctgaccggatggcgtcaggaaactgacttcactgtcgcggagatcgaaatggtcaaattgacgaagaaacagatcgctgatgtgactggcttccaggctatcattaccaccgccgctggtgataggagtgttggtgcgaaaacgcagctgccagaaagtgaggtcgcgaaactgccagcgcatatgtaacaggctctgccagacatccagcgccagagtaacgcgtttaaccgaaaattcgccgccatcttttagttctgcacggatgtcgtgcgcttcaagcgtcggaccaaaattctgccagctggctgagagctgactggcttctaccggcatgccagtcgcggattctattttgttgaggatttccggacgccaggcgtcaagatgcggtaaagcaatacgcaggccgctaaccagcagggcagcgatcacaacgagcgcggctccagtaagcagtaaaatccccggcaatcgcctcacccgtcactccttgtctgctaaaaatgtgactcaaaaaccctttgccggatggcggcccagcatctgtttacatcattacgacgtcaaactgctcctggttatagagcggttcaatttgtactttaacctgtttgccaacgaaaatttccacttccgccagcgagtgtgactcttcgcctttcaaggcttcggctactgccggagaagcatagaccaggaaacggtcggagtcgtaagcatggtggacacgaacaatctcgcgcatgatttcatagcataccgtttccacggttttcaccgttccgcgaccgtggcaggttgggcattcgttacacagtacgtgctcaatgctttcgcgggtgcgtttacgcgtcatctccaccagccccagcgccgaaaaaccattaacgctggttttcacccgatctttgctcagcgcctgctccagcgagtgcagcacgcggcgacggtgatcttcattattcatatcgatgaaatcaataatgataatcccgcccagattgcgcaaccgtaactggcgagcgatagcctgcgtcgcttcaatattggtattgaaaatggtgtcgtccagattgcgatgaccgacaaacgctccggtattgatgtccacggtggtcatcgcttcggtctggtcgataatcagataaccaccggatttcagttctactttgcgttccagcgctcgctgaatttcgttttcgacatcaaagagatcgaaaatcggctggcgtccggtgtaatgctccagcttgctggtcatctcgggaatgtactccgaggtaaactccagcaatgcttcgtaagtcaggcgtgagtcaacgcgaatgcggtcgagttcggcgtcggcgaaatcacgcagaacacgctgcgccagcgccagttctccgtacagctgataacgggtctgcgggcgttttttacgctccatcactttggtccagacgcgtttcagataagcggcatcggaggccagttcagcctcgccaaccccttccgctgcagtacggatgataaacccgccctgctcgtcgcaatactctgcgaccacttttttcaggcgttcacgttctgattcgctttcaattcgttgggataccccaacgtgagaagcccctggcataaacaccagatagcgagaaggtagcgtgatatcggtggtcaggcgcgcacctttagtgccaagcggatctttcaccacctgcaccatcagatcttgcccctgacggaccagttccgagatgtcgcgcaccgtgaattgcttttgttcttcacccgccacacattcagtgtgcggcatgatgtcagatgcatgaagaaacgcggctttatccagcccaatatctacaaaagccgcctgcatacccggaagtacacgacttacacgacccttgtagatattgcctactattccgcgtcgcgcctcacgttcaatatgaatttcctgcagaataccgccatcaatatacgccactcgcgtttccgaaggcgttacgtttaccaacaattcagccgtcatgtttatcccttttctcacgcagtgcgttaaaattacttaataattcatacgtttcaaccagcggtaagccgactacggcgtgaaagctgccatttatcttcctgacaaaacagccacccagcccctgaataccgtatgcacctgctttatctaacggttcgccgctggcgacatagcccgcgatgtcttcgtctgttaacgttctgaaagtcacatcggtgaccaccaggcaatcgagaatgtgctggctgtcagccaacgccactgccgtcatcacctgatgggtctgacccgataatttgcgcaacatctgcgccgcatgctctgcgtcgcgcggtttctcgagcacttctccgttcaggataacgatagtatccgcacccagcaccgggagatcctgcgccgtttgcgcgacacccgcctgtgctttctcgcgcgccagacgcacaacatactgctgcgcgctctcctgcggctgacgctgctcctcaatgcccgtaacaatacgttcaaaggtcacgccaagttgcgcaagtaactcctgacgacgcggagaaccggaagctaaatacagagaagtcatagaaacctttattgcactgcaaactgctgacggactttacgcatcagcaagaaaatccacggccagagcaccccattgactacactactccagaacacttccggtctgaaagagacgttaatcactaaaaactctgcccagaaaacaataatatccaccaccagcgaaagcaacatgacgaccagcgcctgctgccataatgcgaggttgcggaaaagctggtatttcagcgccaccaggtaagcaatgatgctcatcgccaatacgcgtacgccaagcgtcgagccgctgatcagatccagtatggcacccatcacaaaacctgtgcccacatttacgcgatggggcaaggccaggatccaatacaacaagatgagtaacacccagtttggccggaaaacaatcaggttatccggccagggcatgatttgcagcaacagcgcaatgaggaaagagagccagattacccagcgtccctggctacgatagctcgccactattgtcctcccggcgcacgcgcaggcggttgagcaccactttgcggcggcgtagccctttgtggagagcgattagcagcgggctgtgtgggcgcagcaggcgcagtaactgcatttcctgtcgccggttgctgcggagtcggctgagtgatccccgttgccggttcaggtaactttggccccatcgcgtctggcgaaggcaatacctgcggcatcatctgcatcagacgttcattggcaacacgatgcacctcttccggcgtcatcgggttagcgccgttacgatccgcgccccacagcagcagcagataacgcaaacgttgcagtcctgcagtcggacgcgcctgaatcacagtataagcgcgctgggtatcgagttttacggaagagacaaccgcgaccggatagccttccgggaaacgaccgcccagaccggaagtcaccagcacatcaccaacacgaatatccgtattcgctggcagatgctcaagctgcaaatcatccgtacaaccgttaccggctgcaattacgcggatatcgttgcgcagcacctggattggcagcgcgtgggtcgcatcacaaatcagcagcacgcggctagtcagtttagcgacggccaccacctgaccaacaacacctttgtcgctgatgaccggctggccttcataaacgccattaacgctacctttatcgataacaacttgatcgctataaggatcgttaaccgtggagataacctgagtcaccattttctgctcatcctgacgcagcggggaacccagcagctcgcgcagacgcgcgttctcctgtttgtattgtccaagcatcagcagttcactgtttttcagcaacagttcctgacgtaacgcccggttttcaagttctagttggtcacgcgaggccagcgtctgcgatacgccatccagcaattcacgaggagcattggaaacaaagtagaaaggactgacggcggtatccatataagtacggatttgactgaacgtccccaggcgactgtcggcaataataatgccgagcgccaccagcaccgccagaataaggcgaatctgtagcgacgggccacggctaaaaattggcttcataagttatgcgtattctcgtatcagaccaggcagggtaaacagacacttcccctgcctgcatccgattactcttcgctgaacaggtcgccgccgtgcatgtcgatcatttccagcgctttgccgccaccgcgcgccacacaggtcagcgggtcttcagcaacaacgactggaatgccggtttcttccattaacaaacggtcaaggttacgcagcagtgcgccaccaccggtgagcaccatgccgcgctcggagatatcggaagccagttccggcgggcactgttccagtgcaaccattaccgcgctcacaataccggtcagcggttcctgcagtgcttcgaggatttcgttggagttcagggtaaaaccgcgtggaacaccttctgcaaggttacggccacgaacttcgatttcacggacttcatcgcccgggtaagccgaaccgatttcgtgcttgatacgttctgcggtggcttcaccgatcagagaaccgtaattacgacgtacatagttgatgatagcttcgtcgaaacggtcaccaccaatgcgcacggaagaggagtaaaccacgccgttcaaggagataacagcaacttcagtggtaccaccaccgatatcaaccaccatagaaccggtcgcttcagaaaccggcaggccagcaccaattgcggcagccatcggttcttcaatcaggaagacttcacgggcaccagcgccctgcgcggattcacgaattgcgcggcgttcaacctgggtcgcgccaaccggcacacaaaccagaacgcgcgggcttggacgcataaagctgttgctgtgcacttgtttgatgaagtgctggagcattttttcagtcacgaagaagtcggcgataacgccgtctttcattgggcgaatggcagcaatattgcccggcgtacggcccagcatctgcttcgcgtcatgacctactgcagctacgcttttcggtgaaccggcacgatcctgacgaatggccaccacggaaggctcattcaatacgatgccttgtccttttacataaatgagggtattcgcagtacccaggtcaatggacaagtcattggaaaacatgccacgaaattttttcaacatactaagggataatcctgaaagctggggcggaaaagaaaatccgcttactttaccaaccacacgcagcagcgacaaggcgcaaaaatcatctgctacggtgaaaattagtgcagttcgtttcctttgttacaaatctctgcctgagtccagaaaggcttaatgcatcagcagcattcctcgcctgtttgcaaccgcgtaaggtcattcatctgcatatgtgctgcaacaatctggcgagcagacaagcacactcccatgagacgcagcgcgcgttattctacgtgaaaacggattaaacggcaggttaaaccgagtatctttgtgaatattttttcacgttagtatcaagtggctgtgaggacgcgaaaaaatccccttgcccacctgtaacaccacgctgaatcagggtctgccactcgcttcgcgaacgcacgccggtggcgtaaacctgggtgctggtcccggagcaggcttccaccaggctttgaaccagcagttggttctccgttcgcttctcaatgtttctgaccagccccggatggagcttgagtaactcaacattaagttctttgatccaactggtgcttaccagcgtcaaaccagcctggttgacggctacccgtacccctaaagcattcactaaacgaataacaggttgtaagcgactgatatgttgaccaacatcggcctctgcaagttcaataattatgcgtcttcgttgcgatttttcacattgcattaacgtatcgcgcagccaacgctgaaaacgcgggcgaatcagcgactcaacggtaacctgaatcgccagattttcctctggccagtaacgcaatagtggaataagacggctgattagcaggcggtcatactcttccgataaaccaaactgcaagaccatcggcatatactctgccgagctaacctcttcattaccatcgaagatgcggcacatgagttcacgatgatgaacccggccttcgcgagtaaccgccggtttttgataaaggcgcgggccgccgcgactgagcatttgctcgataagcgtacgccagcgaacattaccgcgtcctttttcaggcaacgagtcatcgtaaatagcccagctattgccgccctgcaatcccgcattacgcgtggcagactctgcatgttccattacctgctcggtatcctgaccactacgccaggcacagataccaatgtggatcatatcgtcgcgatcgagcattttattgttcggcaaggtatcgacggctttgattaactgactggcgatgctctctgcctcttttaacgtccggtgcggtaacagcgcagcaaaatcactgcggtggtaacgcgccagcagtgcgccagggtagcgcatcataaatgtcgatagcagattcgtcagagagaagaactgttcttcaacctggctgtgcccccaggtatcactcaacatattgaaatccggcagacgaatcatcatcacgatcccgtgggtaccaactttctcttgatcttccagtaacgttgctaactgattatcgaaaaagagtcggttattgaggccggttttcatgtcctgggcggcataagagcggatcagcgtatcaagacggctgtgttgttcgcgtgcgttctgaatttcacaaagcagcgtatccagcgcactgctggttctgggcggccattcatagatggttcccaacacattagagccacgctcaccgtttaagatacgagtagcccgggtttccagcaattcttgcccggcaagttgccgttgtaaccagcgtaccgccaggaagagcataagaatgataaagccaatcgcccccgtgagcggcgcggtagtcattaaagaatggaaatagttgcccatcggatcctgataaaccagacgcagcgacatccccggatgctttatcaacggaacgctcagttcacgaaacagatcgttggtgccaaccggacgataactaccatttctggccagggtataaacctgcttatcaccatggagcaggtctacacgaacgatatctgccgacatcattaattcggtaatttgtggccttaatgtgctgaagtcattcgacacaaggtaggtatcaatcgccgtcgccaccgcctgaacacgatgactaaacttatactgaatggcgttgtagaaacttagcgaacagcccagcaaagtcacaaaaattgttaacccggtgagcagcgtgacaaaggccgaaaatttcgtcgttaatctcatccttgtgttaactccgatagtgaggaagcgggcatactagcaaatcagatttatctcgcaatttattgcgcttcatcggctttgcttttccattagcgagtatagtcttcagaaattattttccaatccatcatgcacatgaggaccacttatgcaggcgttacttttagaacagcaggacggcaaaactctcgcatcagtacagactctggacgaaagtcgcctgccggaaggcgatgtcacggttgatgttcactggtcgagcctgaactacaaagatgcgctggcgattaccggtaagggaaaaatcatccgaaattttccgatgattcctgggattgattttgccggaactgtacgcaccagcgaagatccgcgttttcatgccggtcaggaggtgttactcactggctggggcgttggtgaaaaccactggggtgggctggcggaacaggcgcgagtgaaaggtgactggctggttgccatgccgcaagggctggacgcgcgtaaagcaatgattatcggtactgccggttttaccgccatgctgtgtgtgatggcgctggaagatgccggtgttcgcccgcaggatggggaggttgtcgtgacgggtgccagtggtggcgtcggcagtaccgccgtggcgctgctgcataagttgggttatcaggtcgttgctgtttccggtcgcgaaagtacccatgaatatctgaaaagtttaggtgccagccgtattcttcctcgcgatgagtttgccgaatcccgtcctctggaaaaacaagtctgggctggggcaattgacaccgttggcgacaaagtgctggcaaaagtgctggcgcaaatgaattacggcggctgcgtggcggcctgtggtctggcgggtggttttactctgccaaccacggtcatgccatttattctgcgtaatgtccgtttgcaaggggtggattcagtaatgacgccaccagcacgccgcgcacaagcctggcagcgactggtcgccgatttaccggaatcattctatacccaggcggcaaaagagatatctctggcagaggcaccgaagtttgccgaggccatcattaataaccagatccagggtcgcacgctggtgaaggttaactaaccatttagcagggaataataagagagggaactcattttgaaatcattattcaatcggttaacgggaaaagcggttagccggacagctttcgtcgaacatcttggtcatgaagttgtacaacatcatccaaactggaaagtcatgatttcgactgaccataaattgatgcgcattgatactccaccaaacagccattattgatacgcctccgtcgcctgttaggtttatggtgctttgccttggcgacgctacgcttaatctgttactgatttctggtaccatggggggaataatctgattttatttgattacaaattaaccacttaaacctattgaatgcggaacattgtcagtcggttaattttgcgtgctttagcattcacatctttccggacgatgcagtgaaaattgggtaatccccagcaaccgctgcgtaatgtcgtctatcttgtcgcgatcctggcatccctacattatttgtggtctgtgaagattatctcattgcagccccccatcttcgcagggctggctttacagcttttcaccttacgttataagaagttccgtcgatgatggcgctaatttcgtgaattgtgcggcttgttgcaaattacacggtgttgaaggttatttacatgttagctgttgattatcttccctgataagaccagtatttagctgccaattgctacgaaatcgttataatgtgcgacctcgtcctccctgacgcagtttttgcgctgcggaaaaggtgacattggcgcaacgaaggtatattttgttttttgccggaggatagcagcagatcgctgcacaatgtccgtcaagtctaacattgacactctggggcaaaatagaccggcgtcccggcctgctggaatttatcgctatgcatacagctgtcggggcatacgctttacagacggcggtgaaacgcctgtcacaatcacactaaacaaagagtacggaacccactcatggatattcgtaagattaaaaaactgatcgagctggttgaagaatcaggcatctccgaactggaaatttctgaaggtgaagagtcagtacgcattagccgtgcagctcctgccgcaagtttccctgtgatgcaacaagcttacgctgcacctatgatgcagcagccagctcaatctaacgcagccgctccggcgaccgttccttccatggaagcgccagcagcagcggaaatcagtggtcacatcgtacgttccccgatggttggtactttctaccgcaccccaagcccggacgcaaaagcgttcatcgaagtgggtcagaaagtcaacgtgggcgataccctgtgcatcgttgaagccatgaaaatgatgaaccagatcgaagcggacaaatccggtaccgtgaaagcaattctggtcgaaagtggacaaccggtagaatttgacgagccgctggtcgtcatcgagtaacgaggcgaacatgctggataaaattgttattgccaaccgcggcgagattgcattgcgtattcttcgtgcctgtaaagaactgggcatcaagactgtcgctgtgcactccagtgcggatcgcgatctaaaacacgtattactggcagatgaaacggtctgtatcggccctgctccgtcagtaaaaagttatctgaacatcccggcaatcatcagcgccgctgaaatcaccggcgcagtagcaatccatccgggttacggcttcctctccgagaacgccaattttgccgagcaggttgaacgctccggctttatcttcatcggcccgaaagcagaaaccattcgcctgatgggcgacaaagtatccgcaatcgcggcgatgaaaaaagcaggcgttccttgcgtaccgggttctgacggcccgctgggcgacgatatggataaaaaccgcgccattgctaaacgcattggttatccggtaattatcaaagcctccggcggcggcggcggtcgcggtatgcgcgtagtgcgcggcgacgctgaactggcacaatccatctccatgacccgtgcggaagcgaaagctgctttcagcaacgatatggtttacatggagaaatacctggaaaatcctcgccacgtcgagattcaggtactggctgacggtcagggcaacgctatctatctggcggaacgtgactgctccatgcagcgccgccaccagaaagtggtcgaagaagcaccagctccgggcattaccccggaactgcgtcgctacatcggcgaacgttgcgctaaagcgtgtgttgatatcggctatcgcggtgcaggtactttcgagttcctgttcgaaaacggcgagttctatttcatcgaaatgaacacccgtattcaggtagaacacccggttactgaaatgatcaccggcgttgacctgatcaaagaacagctgcgtatcgctgccggtcaaccgctgtcgatcaagcaagaagaagttcacgttcgcggccatgcggtggaatgccgtatcaacgccgaagatccgaacaccttcctgccaagtccgggcaaaatcacccgtttccacgcacctggtggttttggcgtacgttgggagtctcatatctacgcgggctacaccgtaccgccatactatgactcaatgatcggtaagctgatttgctacggtgaaaaccgtgacgtggcgattgctcgcatgaagaatgcgctgcaggagctgatcatcgacggtatcaaaaccaacgttgatctgcagatccgcatcatgaatgacgaaaacttccagcatggtggcactaacatccactatctggagaaaaaactcggtcttcaggaaaaataatttgtgacgcgcggtgtttccatcgcgcttagcaaagaacgtaatcaacgccgggcctgttaatgctacccggcgtttttattgccgttaactaacggtagcctgcaatttccgctttcaacgcgctaatttcagcatcgccatcaacaattcccagctcaaagcagtatttctttgtttcccctggttcaataaagggcagacgcccctgcgctcgttctttatcacgaccgtcaagaaaactattactgacctccagtcccataacatattcacccgcgcctaaatttttccactggataaagttgggtagctgcatgatgtcgaatttctcgtaaattccccaccccagttcggcgttcaccagcgcaactttactcatcccctgactgtcgctattcaacgtgagatagtaaacctgctcgtcaaaaccgggctgtggggtacaaatctccagatgactggctaacccttccgccgcatgcggggttcgtggcgttacgcttttagccgacagcaaaatttctgcctgtggcgataataaaggccagccgtaattaaagtgataaagaatttgcagcggctggcgggtgaaaccatgattagtcaccttgtcttcaatgcgcagcacattttcgccataacggcagcgaatggtcctttccagcgtcagattttcaccgaacaatcgtgtttcccgtactttgccattgatgacaaattcaatgctgtcgtcggtccgttctgtgcgataccccacctcttctgctggagtcgcagccaaacgcccgtgtaaccccagcgtttctccttcatcctcacagggcgtgccaatgtagctaagtccgcaggtagtcagtaaccccgcgtaaaagctacgtaaaaacccgttgccctgagactcaaaaaaagcgggggcgacaacaccgttgggggtgataaaagagagcgcagtgtccttgtagctggcccatgcaatatccagcgcgcgatcttttaccaccgtaaatgccagtcccgcaccagtacggacatcaaacgcttctgtaccctttgctctgccactacgtaactcatagtgtttaattccggcaacctgcgagagatcgccaatccacgaccaaatttcgcttttcattgtgctgcttcccgaatggacatgtcatggcgctggatgaacgtttcgatttccataaggcgagacgttccctccattgggccacgtcgggttaccgccagtgcaccgcaggcattggcatattgtaatgcccgatgggcgtcaaaccctagctggcggcaggcaatccatgcgccaccaaaacagtctcccgcaccggtcgggtcaacttcttccaccggatagctctcaacatgaaactgctcattcgcggagtagtaactggctccttgattgccgcgcttcacaatcacctctttaacaccttcttcaagaaaaccagcgattgcacgctccggtgtcgagtgtggcgacaagagcaacacttcgccctcgctgggcatgtagatatctgttaactcaagaacaaagtggagggcatcacgcatttctggaatatcgagcatctctttacgaatattcgggtcgaaagaaataacgccaccatttgctttaacgatggttactgcttttttaactgcgtctaccatatggaatgaaaacagggatgaacccataatatgaaaatgggtacaatccttcagaatattttcatcaacatgctgtgccgataatttaccgcaagcagcattcttgatattaaaaataaaatcgcgatcgccagagttatgataagtaacaaaggcactaccggtggcttccagaggtaagactgaaatccccctgatgtccacaccgtcagcagccagacgatgtatattaatatcaccaaagccatcattccccacgcagctaatgatgccgcacggaacgccaagacgtgtcacctggtcgataaaaatagcgggcgcaccactgggataagggccgttccagatacctggttgatcaaatggctggccgattttactcgccataatttcaaccagaatttctccaattgtgaagaccttactcatatgattaattccttgaaatgattagctgcgttttcttttatttcttacgtcaaaataaacggctacaagaatgactaatcctttaaccaccatctggtaaaaataaggaacattcattaagttcatgccattattaataacgccgatggttaatgcgccgatcaccgtccccaccacggttccatagccgccattcaggctggtgcctcccagtacagccgcggcaatagcatccagttcgtagctcaacgcggaattcggttgcccggaatagaggcgtgaggcaaggatcatcccgctgatacctgccagcacggctgtaatcataaagactttaattttcaagcgggtgacatttatccctgaataaattgccgcttctttattaccaccagtgatataaatttttcgtccaaaggttgttttagtaagaatgaagtggtttatcagcaataagatgattaatatccatataggaataggtatatagagaaattctccattccccagcgccagaaaagcatcatctttaatcatgatgggcataccatcggtcactatataagcgataccacggaagatccccatagtagcaacggtgacaataaacgaagggatccccgctatagccgtcaagccaccatttatcatccccaaagccagtgctgcaataatggataatgggaccaataaaacaaatggaattccccatgaagccccaagcgcagcaaatgtgccaatcaatgcaatggttgaaccgaccgataaatcaatatcgccaagcaaaagcacataagtcattccataggcggtaattgcaattatcgaaacctgaagaataatattagtaatgttattggcggtaaaaaaactgtcattaataaaactgaacagaatgattaacaccaccattccactgaggataccaccatattgcctgaagacttttttaaaattatttgcaatgggaatttccgaaggtttcggactggcaagagttttctctgtcatttaacgtactcctgttgcagcggtcattacctgtgtctgcgttaaattttcacatgaataaatatcggcaatcgttttattacgcattaccaccagacgatcgctaagtgccatgacttctggcagttcagaggacaccagaataattgctgtccctgccgcagccagttgacgtatcacgttatagatttcaaattttgcgccgacatccactccgcgcgttggttcatcgagcaataaaatacgcggagttttctccagccacttcgataacacgattttctgttgattaccgccgctcagtgctcccactgcctgatgcacagaactcactttagtgttcattctggcaattgattgcagcgtcttcgcctcttcttgtcggtgattgatgagtcccatccgcgaagcgttatattgaaacgccacatggtgcgtgttcatattgatgtcgtgcatcagcactaacccttcttccttgcggttttcggtcacaaaagcaatgccatgatcaatagcctgtttgggattagcgatcctgacttccttaccatcaatcaacacagtcccgtgatacgaaacgaggccaaatagcgccttcatcacatcggaacgcccggcccccaccaggccaaaaaatccgaggacttcccccggacgcacagcgaaactgacctctttaaaaagcgaaggatgggaaagattttttacttccagttttgcaggaacattttcatccggtttttccccaagacgtgctggccaaatatttttcatttcccgaccaaccatttgggcaatcaagtgctggatatcactgtttttcttttcatgcgtagcgatatactcaccgtcgcggatcaccgaaatatcatctgaaatccgcataatttcatccatgcgatgagagatataaataaccgcacagcctcgctgctttaatttttcaataatgttaaacaggatctccgcttcattatcacttagcgaagatgtcggttcatccataatcacgacatccgctgcatagcttaaggctttagcaatttctaccagttgcctatgtgccatcgacatattgccgaccatttccagagggtctagtgggatgcccagttccgcgaggaggttctggcaatctgcgagcatttctttatcgttaattataccaaaacgtcgcggttcattattggcataaatattttccgccacggtcatattattactcaggctcagttcctgaaaaataatcgcaatccctaactggcgagaatgctgcggattattaatggtgatggtttcaccacgtagtgttatcgttccctgggttggcggataaacaccggccagtattttcattaatgtcgatttaccggcaccattctcgcctaataaagtatgcacccgccctttacgtaaagagagtgtaatatcttttaatgcctgaacatgaccaaatgtcttcgcaatatgcgaaacatcaagaataacatccgtcataatgacctcggtgtcacaacaaaacgccaataacgttttgttgtgaggtgaagatatttactatttacctgtataaacgccgggttgtaccgggatcattttttctaccggtttaccattgaggtgatcaacagcggcatcaatggctttagcacccatttgatcgggatattgccgaatcacggccgcaaacgttttttcactgtcaacggcatcacgcgcttctttcatgccgtcaaaaccaatgattttgatgttgtcgttatgcgcagattttgctgcgataaccgctgccagcgccgcatcatcaccaaagccaaacagaccattcaggttagcatttgcctgcataatgttttgcgcagtcgttaacgcttcagcccgcgtaataccaggctgttcagcaacaattttaatatccggtgtatcgcttaaccctttcttaaaaccatcaacgcgcgcaaccaccgattgtagtgccggataagaaataatggctacagtacctttaccatgcaaaagtttacccattaacttgcctgcttcaacgcctcccgcatagttatcggtcgcaacatgcgatacgaccggaacgccttccgcagcgacgtcaacggtgataacgggaataccggccttatcggctttaattatcgctgcctggacgcctttcgaatcgaccggagagataataatggcatccacttttttagtaataaaatcctcaacatcagaaagttgtttgtttaaatcctgattggcaatagagacacttaaattgacattgtctttttttgcctcttctttcatggcattcgcaagatcaatatagaaaggatgttgttgtgttaataatgacgcaccaattttatactcttttgccaacgaactttgcgagaacaatgccaggctcaccaacatagctgaaccaagtaatttaatatttttcataaacaatcctcattatttttgtagggtacaacgtcttaaatttttccttcactaccacagacgccaataatacgagttacgacttctttcatggcggcctttgcgggctgcatatagtgacgtggatcatttgccgcaggattgttgtagaaatatccttttaacgcatcggcaaacgcaattttcaattctgtcgcgacattcactttacaaataccgcgacgaatacagtgctgaacgtcctgttccgataagcccgaagcaccatgcaacaccagcggaatctccactcgctgacgaatctgttccagccgcacaaaatccagtcgtggttcatgcgcatataaaccatgtgctgtgccgattgctaccgccagggagtcaatttgggtacgttgaacaaactctgcagctgcggctggtgaggtataagcggaatctttttcatccacccgcagatcgtcctcctggccgccaagacgccctagctcggcctcaacgctaacatcaaagcgatggcaaaaggtggtaacttcttgcactcgcgcaatgttgtcttcaaatggcaaatgggagccatcaatcatgacagaacggatccctgcgcgaaccttgttaaaaatgtcatcactctcttcatgatggtcgagatgcaggactaacggcaggttgtactcgcgagccagcgattgtactaacgaaattaaacttcccacgccaccataacgatatgtaccgggtgttcccgccagcataacgggagagcgaagttgtgcagcgctctcaacaactacctgtaaagtttcaaggttatgaatgttgaaagcagggacggcatatccctctgactgggcttttttcagcatgtttttgcttgaaataatatacatcgcagctcctgttattggtcgttcgccttacaaaatgaagaaagagaatctttactttcattttgaaagcaaactagcacagcaaaagcagcaaaaagcgtgatgcatgtcgaacatcatcaaaataacttacaaaaaataacttaatttatttttcactttgcaagtgaaaccaatgaaaaccctgcataaatatgaatatattcatttatttttcaatgtattaagctattttcgttgcaatttttgacccatgattttcttttcgaattgtcgatatgattgaaggataactttcaaagaaaaatacaaggggctatagtgttacgcattaaaggccaatgaagagtgttaacgtgccgagaaaatcgtctaacctactgaaacgcagattaaaaattgcagaaattgttgccgcccagggtgaaatcaaagttgatgacttatctgcgcaacttggtgtctctggcgtgacgatccgcggcgatctcagttatctggagcaacagggatatttaaagcgatcatttggcggtgctattgcgacaccactctcctctgaaccagaagcgatacaaccgatcgcgccattgtctctggcacaacaaatggaaatagcacgacattgcgcacgattaattcgcgatcgtgacacgctatttcttggacatgggataatctgccgtaagatcattccattgctcagcgaagtgaaaaaactgcgtctgatcaccaacgatcccgaacatgcgctgctggcaaatcagtttattgatggcgaaataatactggctggcagtgaaatgttgcgccccgacaccgcactggccggaaaacagcttgaacaggcacttcagcatttcaccattacacatagcatcctggaaatcagccatctggatgctgatggtactttaaatatcaacgttcccagactcgccgctgcctggcagctctgtttcgatcatgcccagaataagacggttatcgttgccgccgatcctgcgccatcaacggctgctatcgggcatttgcatcaggcagaaaatgtgatcgtcagccgcagcattaacgaacaatatcagcaacaattgcagtcggctgatttcgttatcctttataccagtaatgagtgctttacctggtccaatcgcgaaaggcttcaggaatgagaggggttttgtgacaacaactatctgcgctatgggcgaattgctggccgagtttttgtcccgcaacccacatcaaaaattcactcagcctggggagtttatcgggccatttcccagcggtgcgccagcaatttttgctgctcaggtggcaaaactgtcccatcgggccatcttctttggatgtgttggtaatgatgattttgcccgactcattatagagcgtctccgtcatgaaggtgtcattaccgatgggatccatgttatgaacaatgccgtcacaggtacggcgttcgtgagttatcaaaatccccagcagcgggatttcgtctttaatatccctaacagcgcctgcggtttgtttactgccgagcacattgataaggatctgcttaaacagtgtaaccatctgcatattgtgggctcatcgttgttctcatttcgcatgatcgatgtcatgcgtaaagcaataacgacgatcaaatcggctggcggcaccgtttctttcgatcccaatattcgcaaagagatgctgagcattcctgaaatggcgcaggctctcgattatttgattgaatatacggatatttttatccccagcgaaagcgaactccctttcttcgcgcgtcacaaaaatctgtcagaggaacagattgttagcgatcttctccacggcggcgtaaaacatgtggcgataaaacgcgcccagcgtggggccagctattacaagcttaaaaacggtacattacacgcccagcatgttgcaggtcacgatatcgaaattatcgatccaacgggtgcaggcgactgctttggcgcaacgtttatcactcttttcttatccggtttcccggcacacaaggcgctgcaatatgcaaatgccagcggcgcgctcgccgtaatgcggcaaggtccgatggaagggatatcctcactggcagacattgaagactttttgcagcagcactgaacggcaattttctgtcagattattttccctgcctgaagacttgccgtagaattgcccgtttctcgtatccccccatgaggaggaccccttccgtggacactcgttttgttcaggcccataaagaggcgcgctgggcgctggggctgacccttttgtatctggcggtatggttagtagccgcttacttacctggcgttgcccccggttttaccggctttccacgctggtttgagatggcttgcatcctgacgccgctgctgtttattggactgtgctgggcgatggtgaaatttatctatcgcgatatcccgctggaggatgacgatgcagcttgaagtgattctaccgctggtcgcctatctggtggtggtgttcgggatttcagtttatgcaatgcgtaaacggaacaccggcaccttcctcaatgagtatttcctcggcagccgctctatgggcggtattgtgctggcgatgacgctcaccgcgacctatatcagtgccagttcgtttatcggcgggcctggagctgcttataaatacggcctggggtgggtattgctggcgatgattcagcttcctgcagtctggctttcgctcggtattctcggcaagaagttcgcaattcttgcgcgccgctacaatgcggtgacgctgaacgatatgctgtttgcccgctaccagagtcgtcttctggtgtggctggcgagtttgagtttgctggttgcgttcgttggtgcgatgaccgtgcagtttatcggcggtgcgcgcctgctggaaaccgcggcgggtattccttatgaaaccgggctgctgattttcggtatcagcattgcgttgtataccgcctttggcggctttcgcgccagcgtgctgaacgacaccatgcaagggctggtgatgctgattggcaccgttgtgctgcttattggcgtggtacatgccgcaggtggtttaagtaatgcggtagacacgctgcaaaccatcgatccgcaactggttacgccacaaggcgctgacgatattctgtcgcctgcctttatgacgtcgttctgggtactggtgtgctttggcgttataggcctgccgcatactgcggtgcgctgtatctcttataaagacagcaaagccgtacatcgggggatcattatcggtacgattgtagtcgcaatcctgatgttcggtatgcatctggccggagcgttaggtcgggcggtgatccccgatctcaccgtaccggatctggtgatcccgacgttaatggtaaaagtgctgccaccgtttgccgccgggatcttcctggctgcaccgatggctgcgatcatgtcgacaattaacgcccaactgctgcaaagttccgctacgatcattaaagatctctatctgaatatccgtccggatcaaatgcaaaacgagacgcgtctgaagcggatgtcggcggtgatcacgctggttctcggtgcgttgctgctgcttgccgcctggaagccgccagaaatgatcatctggctgaatttgctggccttcggtgggctggaagccgttttcctgtggccgctggtgctgggtctttactgggaacgtgccaacgccaaaggcgcgctaagtgcgatgatcgttggcggcgtgctgtatgccgtactcgcgaagctgaatattcagtacctgggcttccaccctatcgtgccctcgttactactaagtttgctggctttcctggtcggaaaccgtttcggtacatccgtcccgcaagctaccgttttgactactgataaataaagagttttgccatgccttggatccaactgaaactgaacactaccggcgcgaacgcggaagatcttagcgatgcgctgatggaagcgggtgccgtttctatcacttttcaggatacccacgatacgccagtatttgagccgctgccgggcgaaacgcgcctgtggggcgacaccgatgtgattggtctgttcgacgctgaaaccgatatgaacgacgtggtggcgattctggaaaaccatccgctgctcggcgcgggcttcgcgcataaaatcgaacaactggaagataaagactgggagcgcgaatggatggataatttccacccgatgcgctttggtgaacgactgtggatctgcccaagctggcgtgatgtgccggacgaaaacgccgtcaacgtgatgttagacccagggctggcgtttggtacgggtacccatccaactacctctctgtgcctgcaatggctcgacagcctcgatttaaccggtaaaacagtcatcgactttggctgcggttccggcattctggctatcgcggcgctgaaactgggtgcagcaaaagccattggtattgatattgatccgcaggcgattcaggccagccgcgacaacgctgaacgtaatggcgtttctgatcgtctggaactctacttaccgaaagatcagccagaagaaatgaaagccgacgtggtggtcgctaacatccttgcaggtccattacgtgaactggcaccgttaatcagcgtcctgccagtttcaggcggtttgctgggcctttccggtattctggcaagccaggcagagagcgtttgcgaagcttatgccgacagcttcgctctggacccggtcgtggaaaaagaagagtggtgccgcattaccggtcgtaagaattaaccttcgcatcgccgtatggcgacgcagagcgaagtgcgagcgatgtcacaaaaggcacgttaatttgccgattatttacgcaaatttgcgtgccaaaattttcattcataaagaaaaattgagaacttactcaaatttctttgagtgtaaattttagtcactattttctaatatgatgatttttatgagtaattatcgcgctacgctcattttaaatgcaattctttgatccatctcagaggattggtcaaagtttggcctttcatctcgtgcaaaaaatgcgtaatatacgccgccttgcagtcacagtatggtcatttcttaactcatgcgcatcggacaatatcagctcagaaatcgcctgatcgcagcgcccatggctggcattacagacagaccttttcggacgttgtgctacgagatgggagccggattgacagtatccgagatgatgtcttctaacccacaggtttgggaaagcgacaaatctcgtttacggatggtgcacattgatgaacccggtattcgcaccgtgcaaattgctggtagcgatccgaaagaaatggcagatgcagcacgtattaacgtggaaagcggtgcccagattattgatatcaatatgggttgcccggctaaaaaagtgaatcgcaagctcgcaggttcagccctcttgcagtacccggatgtcgttaaatcgatccttaccgaggtcgtcaatgcagtggacgttcctgttaccctgaaaattcgcactggctgggcaccggaacaccgtaactgcgaagagattgcccaactggctgaagactgtggcattcaggctctgaccattcatggccgtacacgcgcctgtttgttcaatggagaagctgagtacgacagtattcgggcagttaagcagaaagtttccattccggttatcgcgaatggtgacattactgacccgcttaaagccagagctgtgctcgactatacaggggcggatgccctgatgataggccgcgcagctcagggaagaccctggatctttcgggaaatccagcattatctggacactggggagttgctgcccccgctgcctttggcagaggttaagcgcttgctttgcgcgcacgttcgggaactgcatgacttttatggtccggcaaaagggtaccgaattgcacgtaaacacgtttcctggtatctccaggaacacgctccaaatgaccagtttcggcgcacattcaacgccattgaggatgccagcgaacagctggaggcgttggaggcatacttcgaaaattttgcgtaaacagaaataaagagctgacagaactatgttcgaacaacgcgtaaattctgacgtactgaccgtttctaccgttaactctcaggatcaggtaacccaaaaacccctgcgtgactcggttaaacaggcactgaagaactattttgctcaactgaatggtcaggatgtgaatgacctctatgagctggtactggctgaagtagaacagcccctgttggacatggtgatgcaatacacccgtggtaaccagacccgtgctgctctgatgatgggcatcaaccgtggtacgctgcgtaaaaaattgaaaaaatacggcatgaactaattcaggttagctaaatgcttgattaaaaaggcgctactcggcatggggaagcgccttttttataggtgtcacaaagggagtgaccatgagaacaggatgtgaaccgacccgatttggtaatgaagcaaagaccatcatccagggtgatgcattaaccgaacttaaaaagctccccgccgaaagtgtcgatctgatctttgccgacccaccgtataacatcggtaaaaattttgatggtctgatcgaagcctggaaagaagatctgtttatcgactggctgtttgaagtgattgcagagtgccatcgcgttctgaaaaagcagggcagcatgtacatcatgaatagcacggaaaacatgccctttatcgatctccagtgccgcaagctttttaccatcaaaagtcgcatcgtctggtcatatgacagttctggagtgcaggcgaaaaaacactacggctccatgtacgaacccatcctgatgatggtgaaagacgcaaagaactacacgttcaacggtgatgctattctggtagaagccaaaaccggatcgcagcgcgcgttgatcaattatcgcaaaaatcctccacagccttacaatcatcaaaaagtaccgggtaacgtctgggattttccgcgcgtgcgttatttgatggatgaatatgaaaaccacccgacgcaaaaaccggaagccttgctgaaacgcattattctcgcctcttccaacccaggcgatatcgttctcgacccgtttgccggtagctttactaccggtgccgtagccgtcgccagcgggcgaaaattcattggtattgagatcaacagcgagtacatcaaaatggggcttcgacggctggatgtcgcgtcgcattactctgcggaagaactggcgaaagtgaaaaaaagaaagaccggcaacctgtcaaaacgaagccggttaagcgaagttgaccccgatctcattgcaaagtaaaggaagtgtaagcctggttttcagattattcatttcgtgtatatttcctgccagacttggttaaacatgcacaggctcaggtaatgattcgcaagtattggtggctcgtcgttttcgctgtcttcgtttttctgtttgatactttactgatgcagtggattgaactgctggcaacagaaacagacaaatgccgcaatatgaactcagttaatccactaaaactggttaactgtgacgaactgaattttcaggacagaatgtgaatttatatgacacttaattcattcgttttatgaattaatttcgttatgttttcatctggcatgaacattcttaatacgttatcgaccagagcgggggcttgtttataaagatcataacccgccatattcattaaccagttttgaacaattccgctgaaggcaccatcaataataatcatcacaacatctaaatcgagattatttgctacacaaccttgttgctgacacgcctgcaatacttcgcggagagtctgcggattaaagcccatcttttcgcgtatcactccctcggccagcatctcatcattaaattcacatttgtgatataagattttcagcaacgcctgctggcggggaattttggcaatatattgcaaaccgacaatcaatttttcacgcaattgctgaaacgggtcatgctctaacccagcggtcaagtgatcctggattaactcccgcaatgaaggctgttgcaaccacatctcattaaacagttgagtcttgttttcgaagtgccagtagatagcgccacgcgtaacgttagcagcgtcggcaatgtcgttgagcgtcgtcttgcttacgccatgctgcgcaaactgggcgatggcagtttcaatcagttcttgccgggtcttcagggcttcagctttggttctttttgccatgattaattattcaggaaataaatatattcgacacaggatgagaaaatagcgaaggttaatctatcacctaatgtgtatttatacgagaggctaatattgcgttgctataaatcgtcaaataaatgatatgtattatttacataaaatacattcacttgacctatacatatttcaatttacgagattttaattctatttctttcattccgcgtcaaaacaaaacagtagaatattaatctttttttgtgtttatgtgccttgagttgccagtattcataactattccttacatcgacgaatgataatttgtaggatagcgaactgtatttttctttctgcgagttaacgcattgcctttttgggcaaataacgcgcttttggttttttgaggaatagtaatgacgaaacatgccaggtttttcctcctgccctcctttattctgatctccgcggctttaatcgccggttgtaacgataagggagaagagaaagctcacgtcggtgaaccgcaggttaccgttcatattgtgaaaacggccccgttagaagttaagactgaattaccaggccgcaccaatgcttaccgtatagccgaagttcgcccacaggttagcgggatcgtactgaatcgcaatttcactgaaggcagcgatgtgcaagcaggccagtccctgtaccagatcgatcccgcgacctatcaggcaagttatgacagcgcgaaaggcgaactggcgaaaagtgaagccgccgccgccatcgcgcatttgacggtaaaacgttacgttccgctcgtgggtacgaaatacatcagtcagcaggagtacgaccaggccattgctgatgctcgccaggccgatgccgccgtgattgccgcaaaagccacagtcgaaagcgctcgcatcaatctcgcttataccaaagtgactgcgccaattagcggacgtatcggcaaatcgaccgtgaccgaaggcgctcttgtcactaatgggcaaacgactgaactggcgactgtccagcagctcgatcctatctacgttgatgtgacccaatccagcaacgattttatgaggctgaagcaatccgtagagcaaggaaatttgcataaggaaaacgccaccagcaacgtagagttggtcatggagaacggtcaaacctatcccctgaaaggtacgctgcaattctccgatgtgaccgttgatgaaagcaccggctccataaccctacgtgctgtcttccctaacccgcaacatacgcttttgccgggtatgtttgtgcgcgcacggattgatgaaggcgtccaacctgacgccattcttatcccgcaacaaggcgttagccgcacaccacgtggtgatgcaaccgtgctgattgttaacaataaaagtcaggttgaagcgcgccctgtcgttgccagtcaggcgattggcgataaatggttgattagcgaaggtctgaaatctggcgatcaagtcattgtcagcggcctgcaaaaagcgcgtccgggagagcaggttaaagccactaccgatacccccgcagatactgcatcgaagtaaggcaatctgacatggcaaacttttttattcgacgaccgatatttgcatgggtgctggccattattctgatgatggcgggcgcactggcgatcctacaattgcccgtcgcccagtatccaaccattgcgccgcctgcggtttctgtttcggcaaactatccgggtgctgatgcgcagaccgtgcaggatacagtgacgcaggttatcgaacagaatatgaacggtatcgataacctgatgtatatgtcctccaccagcgattccgccggtagcgtgacaattacccttaccttccagtccgggaccgatcctgatatcgcgcaagtacaggtgcagaacaaactccagctcgccacgccgttgctgccgcaggaggttcagcagcaggggatcagtgttgaaaagtccagtagcagctatttgatggtggcgggctttgtctctgataaccctggcaccacacaggacgatatctcggactatgtggcctctaacgttaaagatacgcttagccgtctgaatggcgtcggtgacgtacagcttttcggcgcacagtatgcgatgcgtatctggctggacgccgatctgctaaacaaatataaactgacaccggttgatgtgattaaccagttgaaggtacagaacgatcagatcgctgccggacagttgggcggaacgccagcgttaccagggcaacagttgaacgcctcgattattgctcagacgcggttaaaaaatccggaagaattcggcaaagtgaccctgcgcgtaaacagtgacggctcggtggtgcgtctgaaagatgtcgcacgggttgaacttggcggtgaaaactataacgttatcgctcgcatcaacggaaaaccggcggcgggcctggggattaagctggcaaccggcgcgaatgctctcgataccgcgaaagccattaaggcaaaactggcggaattacagccattcttcccgcagggaatgaaggttctttacccttatgacaccacgcctttcgtccagctttctatccaggaagtggtgaaaacgctgttcgaagccattatgctggtattcctggtgatgtatctgttcttgcagaacatgcgggcaacattgatacccaccattgctgtacctgtcgtgttgttagggacatttgccatactcgccgcttttggttactccatcaatacgctaacgatgtttgggatggtacttgccatcggacttcttgttgatgatgcgatagtcgttgtggagaacgtcgagcgcgtaatgatggaggataaactcccccccagagaagcgacggaaaaatcgatgtcgcaaatccagggcgcgctggtaggtatcgcgatggtactgtcggcggtatttattccgatggcattcttcggtggctcaacaggggcaatttatcgccagttctctatcactattgtttcagcaatggcgctttcagtactggttgcgctgattctcacccccgcgttatgtgcaacattgctgaaaccagtctctgccgagcatcacgaaaataagggaggattcttcggctggtttaacaccactttcgatcatagcgttaatcactacaccaatagcgttggcaaaatcctcggttccacagggcgatatttactgatctatgcgctgattgttgcaggaatggtggtgttgtttttacgtcttccgtcttccttcttacctgaagaggatcagggtgtctttctgaccatgattcagttacccgctggcgcgacgcaagagcggacgcaaaaagtgttggatcaagtgacggattactatctgaagaacgagaaagcgaacgttgaaagtgtctttacagttaacggctttagcttcagcggccaggcacaaaacgccggtatggccttcgtcagtctgaaaccgtgggaagagcgtagtggtgacgaaaacagtgcggaagcagtaatccatcgtgccaaaatggaattgggcaagatccgcgacggttttgtcattccatttaatatgccagccattgttgaactgggcacggcaacgggtttcgactttgagttaattgatcaggctgggctgggtcacgatgccctgacccaggcccgtaaccagttgcttggcatggcggcgcaacatcctgccagcttagtcagcgtgcgccctaatggcctggaagacaccgcgcagtttaaactggaagttgaccaggaaaaggcgcaggcattaggtgtttcactttctgacatcaatcagaccatttcaacggcgttgggtgggacttacgttaacgacttcatcgaccgtggtcgcgtgaaaaaggtgtatgttcaggcggatgccaaattccgtatgctgccagaagatgtcgataaactttatgtccgcagcgccaacggcgaaatggtgccattctctgcctttaccacttcacattgggtgtatggctctccgcgactggaacgctacaacggtctgccgtcaatggagattcagggggaagccgcgccaggaaccagttccggcgatgctatggcgttgatggaaaaccttgcgtcaaaattaccggcgggcattggttatgactggacgggtatgtcatatcaggaacgtttatcgggaaaccaggctcccgctctggtagcaatttcctttgtggttgttttcctgtgccttgctgcactctatgaaagctggtcaattcctgtctcggttatgttggtcgtgccgttagggattgtcggcgtgctactggcggcaacactctttaatcaaaaaaatgacgtctactttatggtgggcttgctaacgacaattggcttgtcggccaaaaacgctattttgattgttgagttcgctaaagatctcatggagaaagagggtaaaggtgttgttgaagcgacactaatggcagtacgtatgcgtctgcgtcctatcctgatgacctctctcgcctttattctcggcgtattaccgctggctatcagtaacggggccggcagtggcgcgcaaaacgcagtcggtatcggggtaatgggcggaatggtctctgcaacgttgctggcaatcttcttcgtgccagtgttctttgtggtgatccgtcgatgctttaaaggataaatcagaaacataaaggcgctttcaggcgccttttttattttcagtgaaccccataaaaattaataagatattcttcttctcactctttaaaaactttctatagttcccgctcccttcactatttttacaattcacataaattgtcattattcattccgcaagatttataacctccagtgataaaatggcattcagctcgttaataagagagttaacttattaagcgttagcgtttattactgaggtaacaccatgaaaagattaattcctgtgacattgctcaccgcattgctggcgggctgtgctcacgattcgccctgcgttccggtttatgacgatcagggtcgtctggttcacaccaatacctgtatgaaaggcacgactcaggataactgggaaacggctggggctattgccggcggggcagcagctgttgctggcctgacgatggggatcatcgctctgtcgaaataactaaacagggcgcggagctccgcgctctttttaacgatacagtatctttccataagataaaatattgctatattctgctgggtaattccctgctgatttagcatgttatatcacgttatttcgctgctttcgaaataacgcatcaatttaactttcacacatcccaccagaaatatactcacgctaataatcattattctgcttagtaaaaaacgcgtaaatattttgcgccaaaatgtggcgcatgttccattttcgcaccattgcggggcgctgtttttattatttcctgtctacactcagcttattgcgacgcgaaatcgtgcgcaaaagctggcactacttttgcttataagaggatggccacagacaggtaaaagacgtttcccaaacgtcctataacgataattttcgcctcacaggaagcattatgaaaaagatgatgatagccacactggctgccgccagcgtgctgcttgccgttgcaaatcaggcgcatgctggcgcgacgcttgatgccgttcagaaaaaaggttttgtgcaatgcgggatcagtgatggattacctgggttctcttatgccgatgctgacggtaagttttcaggtattgatgtagatgtttgtcgtggcgttgccgctgctgtattcggtgacgatacgaaagtgaaatataccccgctcactgcaaaagaacgcttcaccgctttacagtcaggggaggtggatttgctctcccgtaatacgacctggacttcatctcgcgatgccgggatgggaatggcatttactggcgtcacttattacgacggcattggcttcctgacgcacgataaagcggggctaaaaagcgcgaaagaactggatggcgctaccgtctgcattcaggcggggactgataccgaactcaacgtcgccgattacttcaaggcaaataatatgaagtacacgccagtaaccttcgatcgctcagacgaatcagcgaaggctctggaatcgggccgctgcgatactctggcctcggatcaatcacaactgtatgccctgcgcatcaaattaagcaacccaactgaatggattgtcttaccggaagttatctctaaagaaccacttgggccggtagttcgtcgtggcgatgatgaatggttctcgattgtacgctggacgcttttcgccatgctgaatgctgaagagatgggcatcaattcccagaacgtcgatgaaaaagcggctaatccagcaacgcctgatatggcacatctgctgggtaaagaaggcgattacggcaaggatctgaagctggataataaatgggcctttaacatcatcaaacaggtgggtaactactcggaaattttcgagcgtaacgtaggttcagaaagcccgctgaaaattaaacgtgggcaaaataatctatggaataacggcggtattcagtacgcgccgcccgtgcgttaagtcggtgtgaggtaacgagcgtcgctacggcggcgctctcttcagcgttatgctttccgaggtttctatgtctcatcgccgctcaaccgttaaaggctcactctcttttgccaaccctacggttcgcgcctggttattccagatccttgccgttgttgctgttgtcggcattattggttggttatttcacaacactgtaacgaatctcagtaatcgcggcataacatcaggatttgcttttcttgaccgcggggccggttttggcatcgttcagcatttgattgattatcagcaaggcgacacttacggacgcgtttttattgtcggcctgctcaatacgctactggtttctgcattgtgtattgtgttcgcttctgttttgggcttctttatcggtctggcgagactttcggataactggctgctacgaaagctttccacaatttatattgagatcttccgtaatattccgccattgctgcaaatcttcttctggtactttgccgtattgcgcaatttgcccggaccacgacaggcagtgagcgcactggatttggtgtttctgagcaatcgtgggctttatattccgtcgccgcagctgggagataggtttcttgcgtttatcctggctgttgttatagctatagtcctttctgttgggctattccgctttaataaaacacaccagataaagaccggacagctgcgccgcacctggccgatcgccgcagtgttgatcattggtttgcctttactggcgcaatggctttttggcgcagcactacactgggatgtcccagccctacgaggctttaacttccgcggcgggatggttttaattcctgaactggcagccttaacgctggcactttcggtttatacctctgcatttatcgccgagattatccgcgctgggatccaggcagtgccttatggtcaacatgaagctgctcggtcactgggattacccaacccggttacgctacgccaggtcattattccccaggcactgcgggtgattattccaccgttaaccagccagtatctcaacatcgtcaaaaactcctctcttgccgccgcgattggctatcccgatatggtttcgctgtttgctggcaccgtgctgaaccagacggggcaagccatcgagacgatagccatgaccatgtcggtctatctgattatcagcctgactatctcgctgctgatgaatatctataaccgccgcatcgcgatcgttgaacgctaaggagtcatgatgacaaaagtattgctgtctcatcccccgcgcccggcgagccataactcaagccgcgcgatggtgtgggtgcgaaaaaatctgttctccagcttgagcaatagcctactgactattggctgcatatggttgatgtgggaactgatcccaccgttgctgaactgggcatttttgcaggctaactgggttggctcaacgcgtgccgactgcacaaaagccggtgcctgttgggtcttcatccacgaacgatttggtcagtttatgtatgggctttacccacacgaccaacgctggcgaattaacctcgcattactgattgggcttgtgtcgatcgcaccaatgttctggaaaatactcccgtatcgcggtcgctatattgcggtatgggcggtgatttacccactgattgtctggtggctgatgtatggcgggtttcttggtcttgagcgggttgaaacccggcaatggggcgggctgacgctaactttaattattgcatcagttgggattgcgggggcgctgccgtgggggatcttactggcgttaggtcgccgctcccatatgccgattgtgcgtatcttatcggtcatttttatcgagttctggcgcggcgtaccgctgattaccgtattgtttatgtcttcggtcatgctgccgttgtttatggcagaagacaccagtatcgacaaattgatccgcgcgctggttggcgtgatcctgtttcagtcagcatatgttgcggaagtcgtgcgaggcggattacaggcgctgcctaaagggcaatatgaagcggcagagtcgctggcgttgggttactggaaaacccaggggctggttattatgccacaggcgttgaagctggtgattcctgggctggtaaataccatcatcgcactcttcaaagataccagcctggtgatcatcatcgggttgttcgatcttttcagtagcgttcagcaggcaaccgttgatcccgcctggttgggtatgtcgacggaagggtatgttttcgccgcgctgatctactggatcttctgtttcagcatgtcacgttatagccaacatctggaaaaacgttttaacaccgggcgtacaccgcattgaggacactatgagccaaattttactgcaacctgctaacgcgatgattacgctggaaaacgtcaataaatggtatggacaattccatgttttgaaaaatataaatttaaccgtgcaaccgggagaacggatcgttctgtgtggcccttctggttccggtaaatcgacaaccattcgttgtattaatcatctggaagaacatcaacagggacggatcgtggtggatggcatcgaacttaatgaagatatccgcaatattgagcgcgtcaggcaggaagtgggaatggtctttcagcatttcaatctcttccctcatctgaccgtgttgcagaactgtaccctggcaccgatttgggtacgcaagatgccaaagaaagaggctgaagctctggcgatgcattaccttgagcgggtgagaattgccgaacatgcccagaagtttcccggacagatttctggtggtcagcagcaacgtgttgccatagcacgttcgctgtgtatgaagccgaaaattatgttgtttgatgagccaacgtcggcgctcgatcctgagatggtgaaagaggtgctggatacgatgattgggctggcgcagtcgggtatgacaatgttgtgtgtaacacatgagatggggtttgcacgaaccgtcgctgaccgggtgatttttatggatcgtggggaaatagtggagcaagctgcacctaatgaattttttgcgcatcctaaatcagagcgtacgagggcatttttatcgcaggtaatccattaattgaatgttagttcgaaaagcaaaaaggccatcctttcggatggcctttcgcttgatttgatgtctggcagttccctactctcgcatggggagaccccacactaccatcggcgctacggcgtttcacttctgagttcggcatggggtcaggtgggaccaccgcgctactgccgccagacaaattcttttctaatctgccgaactttaacctaaaaagtggtgctgatacccagagtcgaactggggacctcacccttaccaagggtgcgctctaccaactgagccatatcagcacgctaaatttgatgcctggcagttccctactctcgcatggggagaccccacactaccatcggcgctacggcgtttcacttctgagttcggcatggggtcaggtgggaccaccgcgctaaggccgccaggcaaattctgttccattaacccgcttgtcgccggttaatctaatctgtatcaggctgaaaatcttctctcatccgccaaaacatcttcggcgttgtaaggttaagcctcacggttcattagtaccggttagctcaacgcatcgctgcgcttacacacccggcctatcaacgtcgtcgtcttcaacgttccttcaggacctcagaccagctagggatcgtcgcctaggtgagcctttaccccacctactagctaatcccatctgggcacatccgatggcaagaggcctgaaggtccccctctttggtcttgcgacgttatgcggtattagctaccgtttccagtagttatccccctccatcaggcagtttcccagacattactcacccgtcgcctctgccgaactttaacctaaaaagtggtgctgatacccagagtcgaactggggacctcacccttaccaagggtgcgctctaccaactgagccatatcagcacgctaaatttgatgcctggcagttccctactctcgcatggggagaccccacactaccatcggcgctacggcgtttcacttctgagttcggcatggggtcaggtgggaccaccgcgctaaggccgccaggcaaattctgttccattaacccgcttgtcgccggttaatctaatctgtatcaggctgaaaatcttctctcatccgccaaaacatcttcggcgttgtaaggttaagcctcacggttcattagtaccggttagctcaacgcatcgctgcgcttacacacccggcctatcaacgtcgtcgtcttcaacgttccttcaggactctcaaggagtcagggagaactcatctcngnncaagnntcgtgcttanangctntcancantnntctcttccgcnttnagnnaccgggcagtgccattggcatgacaacccgaacaccagtgatgcgtccactccggtcctctcgtactaggagcagcccccctcagttctccagcgcccacggcagatagggaccgaactgtctcacgacgttctaaacccagctcgcgtaccactttaaatggcgaacagccatacccttgggacctacttcagccccaggatgtgatgagccgacatcgaggtgccaaacaccgccgtcgatatgaactcttgggcggtatcagcctgttatccccggagtaccttttntccgttnnnnnnngnccntncnntnnnnancnncngnnnnnnnnnnncnnnnttnnnnncnnnnnnnnncnnnnnnnnnnnnnnnnannnngnntnnnncnntnnnnnnancnncnnnnnnncnnncnngnntnnncnancntnnnnnnncnncnntnnnnnttnngnngnnnncnncccnnnnnaannnnccnncnnnnnnnnnncnnnanccngnntnnnggncnannntnnnannnnnaannntnaanggnngnnnttnnangnnngnnncnnnnnnnnnngnnnncnnnnnnnnaanncnnccnncnnnnnnnnnnnnnnangnnnnannntnnnnnnnnannnnnnnnnaangntnnnngggnnnttncnnnntnnnnnnggnnnnnnnnnnnnnnnnnnnnnnntnnnnttnnnnnnnnnnnnggnngnnnnnnnnnngncnnnnnnnnnnccattcgtgcaggtcggaacttacccgacaaggaatttcgctaccttaggaccgttatagttacggccgccgtttaccggggcttcgatcaagagcttcgcgttaccgctaaccccatcaattaaccttccggcaccgggcaggcgtcacaccgtatacgtccactttcgtgtttgcacagtgctgtgtttttaataaacagttgcagccagctggtatcttcgactgatttcagctccacgagcaagtcgcttcacctacatatcagcgtgccttctcccgaagttacggcaccattttgcctagttccttcacccgagttctctcaagcgccttggtattctctacctgaccacctgtgtcggtttggggtacgatttgatgttacctgatgcttagaggcttttcctggaagcagggcatttgtcacttcagcaccgtagtgcctcgtcatcacgcctcagccttggttttcngnnttnncnngnaaancnnncnnnnnnnntnaancnggnnnancnnnnnccngncnannnnngccttctccgtccccccttcgcagtaacaccaagtacaggaatattaacctgtttcccatcgactacgcctttcggcctcgccttaggggtcgactcaccctgccccgattaacgttggacaggaacccttggtcttccggcgagcgggcttttcacccgctttatcgttacttatgtcagcattcgcacttctgatacctccagcaaccctcacaggccaccttcacaggcttacagaacgctcccctacccaacaacacatagtgtcgctgccgcagcttcggtgcatggtttagccccgttacatcttccgcgcaggccgactcgaccagtgagctattacgctttctttaaatgatggctgcttctaagccaacatcctggctgtctgggccttcccacatcgtttcccacttaaccatgactttgggaccttagctggcggtctgggttgtttccctcttcacgacggacgttagcacccgccgtgtgtctcccgtgataacattctccggtattcgcagtttgcatcgggttggtaagtcgggatgacccccttgccgaaacagtgctctacccccggagatgaattcacgaggcgctacctaaatagctttcggggagaaccagctatctcccggtttgattggcctttcacccccagccacaagtcatccgctaatttttcaacattagtcggttcggtcctccagttagtgttacccaaccttcaacctgcccatggctagatcaccgggtttcgggtctataccctgcaacttaacgcccagttaagactcggtttcccttcggctcccctattcggttaaccttgctacagaatataagtcgctgacccattatacaaaaggtacgcagtcaccccattaagaggctcccactgcttgtacgtacacggtttcaggttctttttcactcccctcgccggggttcttttcgcctttccctcacgactggttcactatcggtcagtcaggagtatttagccttggaggatggtccccccatattcagacaggataccacgtgtcccgccctactcatcgagctcacaatatgtgcatttttgtgtacggggctgtcaccctgtatcgcacgcctttccagacgcttccactaacacacacactgattcaggctctgggctcctccccgttcgctcgccgctactgggggaatctcggttgatttcttttcctcggggtacttagatgtttcagttcccccggttcgcctcattaacctatggattcagttaatgatagtgtgtcgaaacacactgggtttccccattcggaaatcgccggttataacggttcatatcacctcaccgacgcttatcgcagattagcacgtccttcatcgcctctgactgccagggcatccaccgtgtacgcttagtcgcttaacctcacaacccgaagatgtttcttgcgattcatcatcgtgttgcgaaaatttgagagactcacgaacaactctcgttgttcagtgtttcaattttcagcttgatccagatttttaaagagcaaaacttcgcagtgaacctttgcaggtacactctgaagtattttttatttaatcactacagagatggtggagctatgcgggatcgaaccgcagacctcctgcgtgcaaagcaggcgctctcccagctgagctatagccccataacatgtagttaaaacctcttcaaatttgcggtgcaaatttggtaggcctgagtggacttgaaccaccgacctcacccttatcaggggtgcgctctaaccacctgagctacaagcctgtagaggttttactgctcattttcatcagacaatctgtgtgagcactgcaaagtacgcttctttaaggtaaggaggtgatccaaccgcaggttcccctacggttaccttgttacgacttcaccccagtcatgaatcacaaagtggtaagcgccctcccgaaggttaagctacctacttcttttgcaacccactcccatggtgtgacgggcggtgtgtacaaggcccgggaacgtattcaccgtggcattctgatccacgattactagcgattccgacttcatggagtcgagttgcagactccaatccggactacgacgcactttatgaggtccgcttgctctcgcgaggtcgcttctctttgtatgcgccattgtagcacgtgtgtagccctggtcgtaagggccatgatgacttgacgtcatccccaccttcctccagtttatcactggcagtctcctttgagttcccggccggaccgctggcaacaaaggataagggttgcgctcgttgcgggacttaacccaacatttcacaacacgagctgacgacagccatgcagcacctgtctcacggttcccgaaggcacattctcatctctgaaaacttccgtggatgtcaagaccaggtaaggttcttcgcgttgcatcgaattaaaccnnatgcnccnccncttnngngggcccccnnnanttnnttnnnntttnancntnnngncnnnnnncccnngnngnnnnnntnannnnntnnnnncngnanncnnnncnnnanggnnnnancnncnannnnnnnnnnnttnnngnnnngnnnnnnnnggnnnnnnnnnnnnnttnnnncccnnnnnttnnnnncnnnnnnnnnnnnnnnnnncnnggggnnnncnnnnncnncnnnnntnnnncnnnnnnnnnnnnnnttnnncnnnnnnncnngnnnnnnnncccccnnnnnnnnnnnnnnnnnnnnnnnnnnnnnnnnnnnnnnncnngnnnnnnnnnnggnnttnnnnnnnnnnnnnnnnnnnnnnnnnnnnnnnnnntnnnnccnnnnnnnnnnnnnnnnnnnnnnnnccnnnnnnnnnnnnnnnnnnnnnnnnnnnnnnnnnnnnnnnnnnnnnnnnnngnnnnnnnnnnnnnnnnannnnnnnnnnntnnnnnnnnnnnnncccnnnnnnnnnnnntnnnnnnnnnnnnnnnnnnnnnnnnnnnnnnnnnnnnnnnnnnnnnnnnnnnnncnnnnnnnnnnnnnnnncnnnnnnnnnnnnnnnnnnnnnnnnnnnnnnnnnnnnnnnnnnnnnnnnnnnnnnnnnnnntctcagaccagctagggatcgtcgcctaggtgagcctttaccccacctactagctaatcccatctgggcacatccgatggcaagaggcctgaaggtccccctctttggtcttgcgacgttatgcggtattagctaccgtttccagtagttatccccctccatcaggcagtttcccagacattactcacccgtccgccactcgtcagcaaagcagcaagctgctttctgttaccgttcgacttgcatgtgttaggcctgccgccagcgttcaatctgagccatgatcaaactcttcaatttaaaagtttgatgctcaaagaattaaacttcgtaatgaattacgtgttcactcctgagacttggtattcatttttcgtcttgcgacgtcaagaatccgtatcttcgagtgcccacacagattgtctgataaattgttaaagagcagttgcgacgcggctttcagctcactgtcgcgaggtggcgtatattacgctttcctctctcagagtcaaccctgaatttcaggatttttctctttgttgttacgactatcttgtgaagtgtttcacgttgtcgtctcaacggaggcgcattatagggatcccaattttttgcacaagtacttttttgatctttttttctgtttgttgttttttcaccctttttgctgcattcgcacacaaaacggtgcttttttgcatactaaaagacttgcacaaggccaataatgtacccaaagtcattagtaaatcatttattgttgaggtgagtatgtctgatgttttacgcccataccgcgatctttttccacaaatcggtcagcgcgtaatgatcgacgatagcagcgtcgtgattggtgacgttcgtctggctgatgatgtggggatctggccgctcgttgtgattcgtggagatgtacattatgtacagatcggagcacgcaccaatatccaggatggcagtatgttgcatgtcactcataaatcctcgtacaacccagctggcaacccattaaccattggcgaagatgtcactgttggtcacaaggtgatgctccacggctgcaccattggcaatcgagttttggttgggatgggctcaattttacttgatggcgcaatagtagaagatgatgtgatgattggtgcgggtagcctggtcccacaaaataaacggctggagagcggatatctgtatctcggtagccccgtcaaacagatccgcccgttaagtgatgaagagaaggctgggttacgctattccgcaaataactacgtgaaatggaaggacgaatatatggatcagggtaaccacacccaaccttgatcatcttcactttgttcctgaattaagttttccgcttcttcttccaggtcccagcgatgctgacgaaaactcgctaaccactgttctggcgtatctccagtaaagcgatacgccagactctcgccagagatcgcacatgtcagttgcataccattcacgagagcgggaaaacatacacattttttactctcgttccactcttccctatccggaaactggatggcctgattcacgctgacaactcctgttgcaatagtttgatgaccggttctacatcaggcagaacgccatgccaaagaaggaaggcatgagccgcttgtgccaccagcattcctaaaccatcagcagtacgttttgagcctcgctgctcacaccatgccagaaaaggagtttttcctttctgatagaacatgtcatagcaataaatgcctggatgaatgagcgatggcgggatcgccggaatatcaccactgatgccactggatgttgcattaataatgagatcaaactcatgaccttccagttcgtccatacccaacgcgtgaatactgccagtgtgcgcaaacaatttagccaactcttccgcgcgggataccgtccgattagtgattgtcaccgcacagtccagggaaaggagtggcagtagtacgccgcgagatgctccaccagcgccaatgagcagaatacgtaaaccaggacggataaaagacagacgttccagatcgcttaacaaacctataccatcggtattgtcacccagcaggcgtccatcttctaaccgcttgagggtattaacagcaccagccaacgctgcccgttcagtaagctcatccgctctggcaaaagcctcttctttaaaaggtaccgtcacattcgcacctttaccaccagcactaaagaaagtgttcagtgtgttgatgaaatcattgatgggtgccaacacacgcccatagggatgttcaatattcagttgctgagcaaattgctgatgaatgaatggcgatttgctgtgggctatcggattaccaaaaacagcataggtttccattatgttacccctgtcgaaacagttcacccgtcagggcatcgcggatttctgaaggatttaaacgcccccccgtttcaccaggcacaaccgggaacgcagcgccaaattgtgcgcgaacttcgtctactgttcgacaaggtggcaatccactcaagttggcactggtagaaaccagcggtttaccataagcctggcacaaagcaaccaccaacggatggtcggtgactcgtacagcaagcgaatcaaagcggcccgtcaaccagcgcggtgttgtcgcaggcgcgggaaagacaaaggtgacaggacctggccagcgggaaaaaatggtttcacgctgcgcgtcagtcagcatggtgtcatcaatatagggtttaagctgctcgtaatttgccgcgattaaaatcagccccttatcaaccggacgccgttttaactccaacagtctcatcactgctgtttcgctatcaggatcgcacccgacaccgaaaacggcttccgttggataggcgatgacacgttcttcattgaggacatctatcgcagctgcgatagcgtctccttgcaggttattattcacgttattattccgccgaaatcggctttccacattgtttactggcacaaaagtgttttacaccctgcgcggttttcttttcgatgagtagcggataatggcactcagggcattctccagctatgggtttgaagttaatggcaaattgacactccgggtagcgatcacaggagtgaaatgttttgccataacgggagcggcgctgaaccagatggcccgtccggcattgggggcatgtaattgctgtttcgtccggtttatcgataagttcggtatgttcgcattcagggtagttactgcaaccaataaacataccaaagcgtccctggcgtaataccagatttgcgccacatgcagggcaaacctgcccctccagaactttgacaatatgtccatccgctgaagatttcagaggacggacgtagtcacacgccggatactgtgagcatccaagaaacggaccgtgtttcccggatcgaataactagttcagccccgcactttgggcaggactcattattacgcaccgtgaacagtgctgatttcgccataactacttatgctgaattaaagaaatgattaatgcagcataccttcattcacttcaaagagtaattcttccatttgctggtacgcattttcgcagcccggaatattgaacaacaccatcaggattacccatttcaggtcttccaggtcgaactcagcggtatccagcgcgagcactcgctctatcaccatttcacgggtttcaaggttaagcacctgaatttgctcaaggaaaagcagaaaaccacgacagctggcatccagtctttcacactcttcaggggtataaatacgcatggagagtggatcagaggccagttgcatcggttctgccagtccttcctgataatccgcaagcttttccagccaaagcagggcattatagatatcttctcgatcaaatcctgcgtcggtaagatcctgttcaagtttgtcttgatccacacgcaactcagcttctgtgtgaatataggtttcaaacaaatacattagtacgtcgaacatggcatgccctcctcaatcggacatagccgccgggtacagctgcgatccatcctgctaactccagttcgagtagttgagtaactacctctggcacaggttggccggcacgttcagcgacgacgtcaacaggtgttacctcatctcctacgttagccaggagctcaggaaatggcaatgccacgtcttcctgatctggtgaataaaatgaattttcaggggcgtctggcaaccagtgcaatccaaattgcaagttttccagaatttcttccggttccgtcacaagaatcgcaccttgttttattaaccagtgaggcccttcgcttcccggattccctattggacctggcaaagcaaaaacttcacgcccctgctcaagcgcacaacgtgctgtcaccagcgaaccactgcgcaaagccgcttccaccaccagtacacctttacttagaccactgataatgcgatttcttcgtgggaaattgtaagcaaggggtggaacatcgaggggaaattccgagacgagagcaccaccttgctcaagtagactggcagccagtggagcatggcggcggggatgaatggtattaagtccattccccaatacagcaatgctaacgccatttacctgtaaggccgctttatgcgccacaccatcgattccacgcgccagtccactcgtaattgtcactccacgcgtcgccagagtttcgcaaaataatcgtccccatcgctcgccataccatgaatgcgcccgactccccactacggcaagctgaaatgaatgcaacgcgtgcagttctccttcaacaaacagtgcgccggggtaatctgtcgtcgccagaagttgaggaggataaaattcgctgtccgcagggattaaatgatggttgggttgctccaaccaacaaagtgagctttcgatactctttcgcggaaatgaaagaaagcgttgtgcctgccgcaatgtaagccctgtttgctgcaatacaaccgcatcaatatgcgactgttttgccagccagtgagctatacggaccatatcatcgccatacaagctgctgatgctaattaaacgcagccaaatttctgtatcgaccatccttatctccctgccataagcagccttagcaatctttgcgattggtcagtgatgctgtcaatcagagggggatttgtctagaatagaagaaataatctttctaactcctgaacacatctctggagatttatgtcagttttgcaagtgttacatattccggacgagcggcttcgcaaagttgctaaaccggtagaagaagtgaatgcagaaattcagcgtatcgtcgatgatatgttcgagacgatgtacgcagaagaaggtattggcctggcggcaacccaggttgatatccatcaacgtatcattgtaattgatgtttcggaaaaccgtgacgaacggctggtgttaatcaatccggagcttttagaaaaaagcggcgaaacaggcattgaagaaggttgcctgtcgatccctgaacaacgtgctttagtgccacgcgcagagaaagttaaaattcgcgccctggaccgcgacggtaaaccatttgaactggaagcagacggtctgttagccatctgtattcagcatgagatggatcacctggtcggcaaactgtttatggattatctgtcaccgctgaaacaacaacgtattcgtcagaaagttgaaaaactggatcgtctgaaagcccgggcttaaggataagaattaacgtgtcagaatcactacgtattatttttgcgggtacacctgactttgcagcgcgtcatctcgacgcgctgttgtcttctggtcataacatcgttggcgtgtttacccagccagaccgaccggcaggacgcggtaaaaaactgatgcccagcccggttaaagttctggctgaggacaaaggtctgcccgtttttcaacctgtttccctgcgtccacaagaaaaccagcaacgggtcgccgatctgcaggctgatgttatggtcgtcgtcgcctatggtttaattctgcctaaagctgtgctggagatgccgcgtcttggctgtatcaacgttcatggttcactgctgccacgctggcgcggtgctgcaccaatccaacgctcactatgggcgggtgatgcagaaactggtgtgaccattatgcaaatggatgttggtttagacaccggtgacatgctttataagctctcctgcccgattactgcagaagataccagtggtacgctgtacgacaaactggcagagcttggcccacaagggcttattactacgttgaaacaactggcagacggcacggcgaaaccagaagttcaggacgaaactcttgtcacttacgccgaaaagttgagtaaagaagaagcgcgtattgactggtcactttcggcagcacagcttgaacgttgcattcgcgctttcaatccatggccaatgagctggctggaaattgaagggcagccggttaaagtctggaaagcatctgtcatcgatacgacaacaaaggctgcgccaggaacaatccttgaagccaataaacaaggcattcaggtcgcgacaggtgatggcatcctgaatctgctctcaatgcaacctgcaggtaagaaagcgatgagcgtgcaagacctcctgaattctcgtcgggaatggtttgtaccgggcaaccgtctggcctgatagtccactcttctaagcccggtcttaccgggcatctttatatttatacttatgaaaaaacaacgtaatttacgtagcatggcggcccaggccattgaacaagtcgttgagcaagggcaatcactgagcaacattctgccaccgctccagcaaaaagtttccgataaagataaagctcttctccaggagttatgctttggcgtactgcgtacgctctcacagtcagactggctgattaataagctaatggcccgtccgatgacaggcaaacagcgtactgttcattacctgattatggttggtttgtatcaactgctttatacccgcattccacctcatgccgcgctggctgaaacggttgaaggcgcagttgcaattaagcgcccgcaacttaagggattgattaacggtgtattacgtcagttccagcgtcagcaagatgagttattagccgagtttaatgccagtgatgcacgttatctgcatccttcctggttgctgaagcgtctgcaaaaggcgtatcccgagcagtggcaatccatcgtcgaagccaataaccagcgtccgccaatgtggctgcgcgttaatcgtacgcatcattcccgcgacagctggcttgcattgctggatgaagcaggaatgaaaggtttcccgcatgcggattaccctgatgctgtacagctggaaacacctgcacctgttcatgcgctacccggttttgaagaaggatgggttaccgttcaggatgcttcagcacaaggttgcatgacctggcttgctccacaaaatggtgaacacattctggatctttgcgccgccccaggcggtaaaacaacgcatattcttgaggttgctccagaggcgcaagttctggcggtcgatattgatgagcagcgcctctctcgcgtttacgacaatttaaaacgccttggtatgaaggcaaccgtaaaacaaggtgatggccgttacccttcccaatggtgtggtgagcaacagttcgatcgcattttattagatgcaccttgttcggcaactggtgtaattcgtcgccatccggatattaaatggttacgccgcgatcgcgatatcccagaactcgcgcagttgcagtctgaaattctcgacgccatctggtcgcatttaaaatccggaggaaccctggtctatgccacctgttcggtgttaccggaagagaatagcctgcagattaaagcctttttgcaacgtaccgctgatgccgaactttgcgaaacaggaacaccagagcaaccgggtaaacaaaatttgcccggtgccgaagagggcgacggcttcttttacgctaagctaatcaaaaagtgatgagataacgggtcgcgactgatgaaaattatcattctgggtgccggccaggttggcggcacactggcggaaaacctggttggcgagaacaacgatattactgttgtcgataccaacggtgagcgtctgcggaccttacaggataaatttgacctgcgagtcgtgcaggggcatggctctcatccacgcgtattgcgggaggcaggtgccgacgacgccgatatgctggttgctgtaaccagttcagatgaaaccaatatggttgcctgccaggtagcctactcacttttcaacacccctaatcgcatcgctcgtatccgctcaccagactacgtgcgcgatgccgataagctatttcattcagatgctgttccgattgatcatctgatcgcaccagagcagttggttatcgataatatttaccgactgattgagtatcccggcgcattgcaggtggtgaacttcgctgagggtaaagtcagcctggctgtggttaaagcctattatggcggcccgctgattggtaatgcactttcgaccatgcgcgaacatatgccacatatcgatactcgtgtggcagcaattttccgccacgatcgccccattcgtccgcaaggttcgaccattgttgaagctggtgatgaagtgttctttattgccgcttcacagcatatccgcgcggtgatgagtgaattacagcgactggaaaaaccgtataagcggatcatgctggttggtggcggtaatatcggtgcagggctggcgcgtcgtctggaaaaagattacagcgttaaactcatcgaacgtaatcagcagcgcgctgccgaactggcggaaaagttgcagaatacgatcgtcttttttggtgatgcgtcggatcaagaactgctggccgaagaacatatcgatcaagttgatctgtttattgccgtcaccaacgatgacgaggccaatatcatgtccgccatgcttgccaaacgtatgggtgcgaaaaaggtgatggtattgatccaacgtcgcgcttatgtggatctggttcaggggagcgtgatcgatattgcgatttcaccacaacaagcaactatttctgcgttgcttagccatgtgcgaaaagcagatattgttggtgtttcctcattacgccgcggcgtagcagaagctattgaagccgttgctcacggtgatgaaagcacctcacgcgttgtcggcagagtcattgacgaaatcaagctaccgccaggaacgattattggagcggtggtacgtggaaacgatgtgatgattgccaatgacaatctgcgcattgagcaaggcgatcacgtaattatgttcctcacagataaaaagtttattaccgacgtcgaaagactcttccagccaagtcctttcttcttgtaattaataaggcgtctaatgacgccttattatttccctttgattattaaggattaattaaatccattcctggcaggaaaatggcttaacatttgttagacttatggttgtcggcttcatagggagaataacatgagcattattaaagaatttcgcgaatttgcgatgcgcgggaacgtggtggatttggcagtgggtgtcattatcggagcggcattcgggaagattgtatcttcactggttgccgatatcatcatgccacctctgggcttattaattggcgggatcgactttaaacagtttgctgtcacgctacgcgaggcccaaggggatatccctgctgttgtgatgcattacggtgtcttcattcaaaacgtctttgattttctgatagtggcctttgccatctttatggcgattaagctaatcaacaaactgaatcggaaaaaagaagaaccagcagcagcaacacctgcaccaactaaagaagaagtattactgacagaaattcgtgatttgctgaaagagcagaataaccgctcttaacaagcgtctgaaagcagaaggccagtggtaaaaaagtgatttactttcttgccactggcctcccagttcccccgattgccatgttttccttttcgcatgtaactgcctttccctttcttatttttctctactcgctgtcggaataagggatcatgtagtaatgcttctatcgcattatcctttatctgccctttagtatgctgatatcggctcataaaaactccagttggttatttaacggcgcgagtgtaatcctgccagtgcaaaaaatcaacagccactcttaacgccactcgccccttgttcaagagcttcaagaatcgagcaataaacactgctatgggcggtcccacaacaggtatcattaaggcgttgcaaggaacgctgcatactctgcaactcggctatacgagcttcgacttcctgcaatctttcctgcacaatgccttttgactcctgacaggtatggtgttcaggatcgatacggatcgacagcaactcgcggatcgactccagactgaaacctagttgtctggcatggcggataaatttcaatcgctggagatcgctttcggtatacaggcgaaacccaccttcggtgcgtacttcatgctccatcatctgctgcttttcgtaataacgaatcgtgtcgggtgttacttccgccatttttgccagctcaccaatgcgatacatacatactccactagttatcgttgattttgttcaacaacttgtcagcataatcgccgcgtaaaaaatcggtactcaatccagcttgtcgcagcttcaattccagtaatgacaatcgacgactaacctcttgatattgcggatcatcatgacggatacctttgagaatatccagaagctgtattgcttccctcctatgctcaagttctggcggtaagcaaccagcattcttcagcaagcgataccccgcacgtaattccggtggcacatgagaatcatcatccagtatcaatggttcgccgctacctaccaggttatcaaactcacctttcgcttgcgcttctgctatatgacgctctgcccactggtcaagtaaccacataaatactccaggggatgaacaaaaagagtacagctattgtagataagtggggatgctacgggtataaaaaaacccgccggggcgggtttttttacgttgcttcagattactctgcagcagcttctgctttctctgaacgatcaaccagctcgatgtaagccatcggcgcattgtcgcctgcacggaagccacacttcagaatacgagtgtaaccaccggcacggctcgcgaaacgcgggcccagttcgttaaacagttttgccacgatctcgttatcacgagtacgggcgaatgccagacgacgattagcaacgctatcagtcttggcaagagtaatcagcggctcaactacgcggcgcagctctttcgctttaggcagagtcgtcttgatgatttcatgacgaaccagtgaacctgccatattgcggaacatagcctggcgatggctgctgttgcggttcagttgacgaccactcttacgatggcgcatgaccttatccttctcagtaaaaccttaacctgtgatccggttactcgtcagcgatgcttgccggtggccagttttccaggcgcatgcccagagacagtccacgggaagccagcacgtctttaatctcagtaagagattttttaccaaggttaggcgttttaaggagctcaacctcggtacgctgtaccagatcaccgatatagtggatagcttctgctttaaggcagttagcagagcggacagtcaattccagatcgtcaacagggcgcagcaggatcggatcgaactctggtttctcttctttcacttcaggctgacgtacatcacgtaagtcaacgaaagcttccagttgttcagccagaatggttgccgcacgacgaatcgcctcttcaggatcgattgtgccgttggtttccatttcgatgaccagcttgtccaggtcggtacgctgttctacacgcgctgcttcaacattgtaggcaatacgctccacagggctgtagcatgcgtcgaccagcagacggccgattgggcgctcatcttcttccgaatgaattcgggtagaagccggcacataaccacgaccgcgctgaactttgatacgcatgctaatagacgcgttctcatcggtcaggtggcagatcacgtgctgcggcttgacgatttcgacatcaccgtcgtgggtgatatcggctgcagtcacagggccaatgccagatttattcaaggtaagaataacttcatctttgccctgaactctcaccgccagccctttcaggttgagcaggatttccaggatatcttcctgaacgccttctttggtgctgtactcatgtagtacaccatcaatctcaacctcggtcaccgcgcaacccggcatcgatgagagcagaatacggcgcagtgcgttacccagagtatggccaaagccacgctctaaaggctcaagggtcaccttggcgtgcgtcgaactcacttgctcgatatcaaccaggcgcggttttagaaactctgtcacagaaccctgcattgtgtcctctctttggtactaagctttacttggagtaaagctcgacgatcaggtgttcgttaatgtccgcagacagatcagaacgctccggcttacgcttaaacgtaccttccatcttgccagcatcaacttccagccaggttggcttttcacgctgctcagccagctccagagcggctttcacgcgagactgcttcttcgctttctcacgaatgcttacaacgtcattcggactaacctgataagaagcgatgttaacaacacgaccgtttaccataattgctttatggctaaccagctgacgtgcttctgcacgagtggcaccgaagcccatacggtatacaacgttgtccagacgaccttccagcagagccaacaggttttcaccggtgttgcctttcagacgtgctgcttctttgtagtagttacggaactgacgctccagcacaccatagatacggcgaactttttgcttttcacgcaactgcacaccatagtcagacagacgcggtttacgcgcaccgtgctggccaggagcttgttcaattttacacttggtatcgatcgcgcgaacgccagacttaaggaataagtcggtgccctcacgacggctcagcttgagcttaggacccaaatatcttgccattttctttctccaacaaacctggaaaacgaggcgttatacgcgacgttttttcggcggacgacaaccgttatgagggatcggagtcacatcagtaatgttagtgatgcggaaacctgcggcgttcagagcacgaatagtagattcgcggcctggacccggacctttaaccataacttccagattcttgatgccgtattctttcacggcgtcagcgcaacgctctgctgcaacctgtgctgcaaacggagtggatttgcgagaaccacggaaaccggaaccaccggctgttgcccaacccaacgcgttaccctgacgatcagtgatagtcacgatggtgttgttgaaagaagcatggatatgagccacgccgtcagagacttgttttcttacacgtttacgtgcacgaattggtgcctttgccattattcaatcaccccgattatttcttgatcggtttgcgcggacccttacgggtacgtgcgttggtcttggtacgctgaccgcgaaccgggagaccacgacgatgacgcaaaccgcgatagcaaccaagatccatcaggcgcttgatgctcatgctgatttcacggcgcagatcaccttcaacgacaaatttggcaacttcgtcacgcagcgtgtcgatttgtccttcagacagctcactgatcttaacatcttcagcgatacccgctgcagccaggatggctttagaacgggtcttgccgacgccataaatcgaagttaatgcgattacggcatgcttatgatcaggaatgttaatgcctgctatacgggccactatgcactcctactatttaatatgtacgttccatgctgaaaagcccgttttcaggatactcaaatggaaacgcacagacatacaaaagattggctggctaatctagccagctcaacccaactttgcaagaaaaatatgcgaaaaaatcagccttggcgctgtttatgcttcggctcggcactgcaaatcacacggatgacaccatcacgcttaacgattttgcagttacggcataatttcttgacggaagcacgaactttcatttttactctccgtaacttctcgggcgaccaattatcggccgtagcctttcaggttcgccttcttcaatgcagactcatactgactggacatcatcagagtttgcacttgagccataaagtccataatcacgacaacaacgataagcagtgaggtcccaccgaagtagaacggtactttcattgcatcacgcatgaactccgggatcaggcagataaaggtaatgtacagcgcaccaaccaaggtcaggcgggtcattactttatcgatatacttcgccgtttgctctcccggacgaattcctggtacaaatgcaccggacttcttcaggttatctgctgtttcacgcgggttgaaaaccaacgccgtgtagaagaaacagaagaagatgattgcagacgcatagagtaacacataaagcggttgcccaggctgcaaatacagcgaaattgttgtcagccagttccaaccagtaccgcccccgaaccatgacgcgatggtcgccgggaacagaataatactggaagcgaagattgccgggattacccccgccatattcactttcagcggtaaatgtgtgctctgtgcagcatagacacgacgaccttgctgacgtttcgcgtagtttaccacaatgcggcgttgaccacgctcaacaaatacaacaaagaacgtcactgcaaatactaatactgcaaccaacagcaacacgaggaagtgcaggtcgccttgacgcgcttgctcgatagtatgggcaatggctggcgggagtcccgcgacaataccggcgaagataatgattgaaataccgttgccgatacctcgttcagtgatctgttcgcccaaccacatcaggaacatggttcctgtgaccagacttacaacagcggtgaagtagaatgcaaagcccgggttaatcaccaggccttgcataccaggcatattcggcagaccagtagcaataccgatcgactggaatattgccagcaccagagtaccgtagcgggtgtactggctgatcttacgacgaccagactccccttctttcttaatttctgccaacgttggatgaaccaccgtcagtagctggataatgatcgacgccgaaatatacggcatgatccccagagcaaagatagaagcacggctgagagcaccaccagagaacatgttaaacatctcaatgatggtgcctcgctgttgctcaagcagtttggcaagtacagcggcatcaataccagggatcggaataaaagagccaatacggaacacaatcagcgcaccgataacaaacagcagtctgcgtttcagctcgcctaagccacctttggcactttgaaaatctaatcccggttgtttagccatctgctacttattcctcgattttaccgccagcagcttcgatagcagcacgagcgcctttagtaacacgcaggccacgaacagttaccggagtcgttacttcgccagccaggatcactttcgcgaactcgatctggataccgataatgttagccgctttcagcgtgttcaggtctacaacaccgccttctactttagccaggtcagacagacgaacttcggctgtaatcgctgctttacgagaagtgaagccgaatttcggcagacgacggtacagaggcatctgaccaccctcgaaaccgcgacgtacgccaccgccagaacgagatttctgacctttgtgaccacgaccaccggttttaccgaggccagaaccgataccacgacccaggcgtttacccgcctttttggagccttcggccggagacagagtatttaaacgcatctcttactcctcaactttaaccatgaaggaaaccgcgttgatcataccgcgaatagcaggagtatcctcgcgctctacggtgtgaccaatacgacgcagacccaggccaagcagcgttgccttgtgtttcggcagacgaccgattgcactgcgggtttgagtaattttaatagtctttgccatggtttatttccccagaatttcttcaacggatttaccacgcttggcagcgaccatttctggagaattcatattttccaggccatcgatagttgcacgaaccacgttaatcgggttggtggaaccatacgctttagccagaacgttatgaaccccagcgacttccagaacggcgcgcattgcaccaccggcgatgataccggtaccttcggaagccggctgcatgaatacgcgagaacccgtatgaacacctttaacagggtgttgcagagtgccgttattcagcgcgacgttaatcatattgcgacgggctttttccatcgctttctggatcgctgctggaacttcacgcgctttaccgtaaccaaaaccaacgcgaccgttaccatcgccaactacagtcagagctgtgaaggagaaaatacgaccacctttaacggttttagatacgcggtttaccgcgatcagcttttcctgcagttcgccagcttgtttttcgatgtgagccatcttacacctctaccttagaactgaaggccagcttcacgggcagcatctgccagtgcctggacacgaccatgatattggaacccggaacggtcaaaggatacatctttgatgcctttttccagagcgcgttcagcgacagctttacccacagctgcagccgcgtctttgttaccggtgtacttcagttgttcagcgatagctttttctacagtagaagcagctaccagaacttcagaaccgttcggtgcaattacctgtgcgtaaatgtgacgcggggtacgatgtaccaccaggcgagttgcgcccagctcctggagcttgcggcgtgcgcgggtcgcacgacggatacgagcagatttcttatccatagtgttaccttacttcttcttagcctctttggtacgcacgacttcgtcggcgtaacgaacacccttgcctttgtaaggctcaggacgacggtaggcgcgcagatccgctgcaacctggccgatcacctgcttatcagcgcctttcagcacgatttcagtctgagtcggacattcagcagtgatacccgcaggcagctgatggtcaacaggatgagagaaacccagagacaggttaatcacattgcctttaaccgctgcacggtaacctacaccaaccagctgcagcttcttagtgaagccttcggtaacaccgataaccattgagttcagcagggcacgcgcggtaccagcctgtgcccaaccgtctgcgtaaccatcacgcggaccgaaggtcagggtattatctgcatgtttaacttcaacagcatcgttgagagtacgagtcagctcgccgtttttacctttgatcgtaataacctgaccgttgatttttacgtcaacgccggcaggaacaacgaccggtgctttagcaacacgagacattttttcctccgattaggctacgtagcagataatttcgccaccaagaccagcctggcgcgctgcacgatcagtcataacacctttagaggtagaaacaactgcgatacccagacccgccataactttcggcagctcatctttacgtttatagatgcgcagacctgggcggctgacacgctgaatgctttctacaacagctttgccctggaaatacttcagagtaagttccagttcaggcttggtgtcgccttcaactttaaaatcttcaataaaaccttcttccttcagcacgttggcgattgccactttcagcttggaggaaggcatggtgaccgcagctttgttcgcggcctgaccgttacggatacgggtcagcatatccgcgatcggatcttgcatgctcatctgtctttactcccgtgattcaattggtgacaattaccagctagcctttttcagacccgggatttcaccgcgcatagcggcttcacggaccttaatacggctcaacccgaacttccgcaggaaaccatgcggacgacctgtttgacggcagcggttacgctgacgagacgggctggaatcacgcggcagagtctgcagcttgagaacagcgttccaacgatcttcgtcggaagcgttcacatcagagatgatcgctttcagttcagcgcgtttcgcgaagtatttatcagctaaagctacgcgttttacttcgcgtgctttcattgattgcttagccatttagtaaccctaccttacttgcggaacgggaagtcaaaggcagccagcagagcgcggccttcttcgtcagatttcgcagtagtggtaatggtaatatccaaaccacgaacgcggtcgactttatcgtagtcgatttctgggaagatgatctgctcacggacacccatgctgtagttaccacgaccgtcgaaagacttagcggacaggccacggaagtcacggatacgaggtacagcaatagtgatcaggcgctcaaagaactcccacatgcgttcgccacgcagagttactttacagccgatcggatagccctgacggattttgaagcctgcaacagatttgcgtgctttggtgatcagcggtttttgaccggaaattgctgccaggtctgctgctgcgttatccagcagttttttgtcagcgatcgcttcaccaacacccatgttcagggtgatcttctcgacccgagggacttgcatgacagaattgtagttaaactcagtcatgagttttttaactacttcgtctttgtagtaatcatgcagtttcgccatcgtactactccaaattacttgatagtttcgctgttagacttgaagaaacggacttttttaccgtcttcgaatctaaagcctacacggtcagccttgccggttgtcgcattgaagattgctacgttggaaacctgaatagcggcttctttttcaacgatgccacccggttggttcagggccggaaccggcttctgatgtttcttaaccaggttgataccttcaacaatgaccttgccggaagacaggacattcttaactttaccgcgtttacctttatctttaccggttaacacgataacttcgtcatcacgacggattttcgctgccatgattcgctccttagagtacttctggtgccagagagataattttcatgaacttctcactacgaagctcacgagttaccggcccaaaaatacgcgtaccgataggctgctcgctgttgttgttcagaagaacacaagcattaccatcgaagcgaatgacagaaccgtccgggcgacgaacacccttcttggtgcgcaccactaccgccttcagcacatcaccttttttgaccttaccacgcggaattgcttctttgatggtgatcttgatgatgtcgcctacgcctgcgtagcgacggtgcgagccacccagaaccttgatacacattacgcgacgtgcaccggagttgtcggcgacgttcagcatagtctgttcttggatcattttagtgctccgctaatgtcaactactactgagacccgaaaatcaggtcgttaaaaatccccatatcgagggcgcggcattataacaccgcttcaaggatatgggtagaaaaaataaacggctcatttctgagccgtttattcgtatcgagagagtgtactgtattacagaaccgctttctctacaacgcgaaccagcgtccaggatttagtcttggacagcggacggcattcgcggatttcaaccacgtcaccgataccgcattcgttgttctcgtcatgtacgtgcagtttggtcgtacgcttgatgaatttaccgtagatcgggtgtttcacaaaacgttcgatagcaacaacaatggatttctccattttgtcgctaacaacgcgaccttgcagagtacggattttatcggtcattacgcacccgccttctcgttcagtaaagtcttaacgcgtgcgacatcgcgacgcacttgcttcaacaggtgagactgttgcagctggccacttgcagcctgcatacgcaggttgaactgctcacgcagcaggttcagcagctcggtgttcagctcttcaacgctcttctcacgcagctcttttgctttcattacatcaccgtcttagttacaaaggtggttttaatcggcagtttcgctgctgccagcttgaatgcttcacgggccagctcttccggaacaccgtccatttcatacaggactttacccggctgaatcaaggcaacccaatactccacgttacctttacctttacccatacgcactgccagcggcttttcagtgatcggtttgtccgggaacacacggatccagatcttaccttgacgcttaactgcacgggtcatagcacgacgtgctgcttcgatctgacgtgcagtcagacgaccacggccaacagctttcagaccgaagctgccgaagctaacatccgtaccctgcgccagaccgcggttacggcctttgtgcattttacggaattttgtacgctttggttgtaacatcagcgacgctccttatttacggcctttacgctgctgctttttaggctgagcagccggtttttccggttgttcaacagcagccataccacccaggatctcgcctttgaagatccacactttaacgccgattacaccgtaagtggtgtgcgcttcagaggtgttgtagtcgatgtcagcacgcagagtgtgcagcggtacgcgaccttcgcggtaccattcggtacgtgcgatttccgcgccgcccagacggccgctaacttcaactttaatacctttagcgcccagacgcattgcgttctgtacagcacgcttcatagcacgacggaacataacgcgacgttccagctgagaagtgatgctgtcagcaaccagttttgcgtccagttcaggcttacgaacttcggcgatgttgatctgtgcaggaacgccagcgatgtccgctacgaccttacgcagtttttctacgtcttcaccttttttaccgataacgatacccgggcgagcagtgtgaatggttacacggatgctcttagccggacgctcgataacgatacgagatacggacgctttagccagttccttagtcaggtactgacgtactttaaaatcgctgtccaggttgtcagcgaattctttggtgttcgcaaaccaggtagagttccatggttttacaatacccaggcgaataccattaggatgtactttctgacccattgctagtctccagagtctcagcgatcggacacaaccacagtgatgtggctggtgcgcttcaggatgcgatctgcacgaccttttgcacgcggcataatgcgcttcatgctcgggccttcgtctacgaaaattttcgtaactttcagatcgtcaatgtcagcgccatcgttgtgttcagcgttagcaatggcagattccagaactttcttgaccagtacagccgctttcttgttggtgtaggtcaaaatatccagagcctgcgacactttcttaccgcgaatcaggtcagcaacaaggcgaaccttctgagcagaagaacgagcatggcgatgtttagcgatagtttccatctcttcctcctaccttatttcttcttcgcttttttatcagcagcgtggccgcgataagtacgagtcggtgcgaattcacccagtttgtgaccgaccatttcgtcggttacaaataccggaacgtgctgacgaccattatggacagcgatggtcaaaccgatcatgttaggaaagatcgttgaacgacgggaccaagtgcgcaggggcttcttgtctccgctttccaccgctttctctaccttcttcagcaagtgcaggtcaataaaaggacctttcttgagagaacgtggcatggcttatcctctaaaattatttgctacggcgacgtacgatgaatttatcagtacgcttgttgctgcgggtcttcttacctttggtctgaacgccccacggagttaccgggtgcttaccaaagttacgaccttcaccaccaccatgtgggtggtctaccgggttcatcgcggtaccgcgaacggtcggacgaacaccacgccagcgtgcagcacctgctttacccagaacgcgcagcatatgctcagcattgccaacttcgcccagagttgcacggcagtctgcttctactttacgcatttcaccagaacgcagacgcagggtgacataagcaccatcacgagcaacgatctgaacgtaagtaccagcggaacgtgccagctgaccgcctttacctggtttcatttctacgttatgaacagtagaaccaaccgggatgttgcgcatcggcagggtgttacctggtttgattgcagcatcaacgccagactgaatctggtcgccagctttcaggcctttaggggccaggatgtaacggcgttcaccgtctttgtacagaaccagcgcgatgttcgcggaacggttcggatcgtactcaagacgttcaacaactgccgggataccgtctttgttgcgtttgaagtcaacaatacggtaagcctgcttgtggccaccaccgatatgacgagtggtgatacggccattgttgttacgaccaccggatttgctgtttttttccagcaacggagcaaaaggtttgcccttgtgcagctcagggttaaccactttaactacgtggcgacgacccggagatgtcggtttacatttaacaactgccattgtattactcctccgacttactcagcgccgccaacgaagtccagattctggccttctttcagggtgacgtaagcttttttccagtcgctacgacgaccgatacgctgtccgtgacgtttaactttccctttaactaccagggtgttaacgacttcgacttcgacttcaaacagtttctgcacagcagctttgatttctgctttggtcgcgtctttagcaactttgagtacgatggtgttggatttttccatcgcagtagacgctttttcagaaacgtgcggtgcacgcagcaccttcagcagacgttcttcacgaatcatgccagcatctcctcaacttgcttaacagcatcagcagtcattacgactttgtcgaaggcgatcaggctaaccgggtcgataccagttgcatcgcgtacgtcaaccttgtgcaggttgcgcgcagccaggaacaggttctcgtccagctcaccggtgatgatcagcacatcttccagagccatgtctttcagtttctgtgccagcagcttagttttcggcgcttctacagagaacttctcgacaacgatcagacgatcctgacgtaccagttcggacaggatgcttttcagcgcgccgcggtacatcttcttgttaactttttgactgtggtcctgcggacgagcagcaaaggtcacgccaccagaacgccagatcgggctcttgatagaaccagaacgcgcacggccggtgcctttctggcgccacggttttttaccggaaccagttacttcagcacgagtcttctgagcacgagtaccctgacgagcaccagctgcataagcaacaacaacctggtgaaccagcgcttcgttgaaatcacgaccgaaggtagtttcggaaacagtcagcgcgctctgcgcgtctttcaatactaattccattgctatctccttacgccttcacagctggtttaacgatcaggtcgctaccggttgcacccgggacagcgcctttaaccagcagcaggttgcgctcagcgtcaacgcgtactacgtcaaggctctgaacggttacacgttcgttacccatctgacctgccattttcttgcctttgaacactttgcccggagtctggttctgaccgatagaacccggaacgcggtgagacaaggagttaccgtgagtagcgtcctgggtacggaagttccagcgcttaacggtacctgcgaaacctttacctttagaggtgccagttacgtcaacttttttaacgtcagcaaacagttcaacgctaatgctctgacctacagtgaactcttcgccttcagccaggcggaattcccacagaccacggccagcttctacgccagctttagcgaagtgtccagcttcaggcttggtcacacggttagcttttttagcaccggtggtcacctgaatagcacggtagccatcgttagccaggtctttaacctgagtaacgcggtttgcttcaacttcgattacggttactgggatagaaacgccgtcttctgtgaagatacgggtcatacccacttttttaccgactaaaccaatcattgtttcaacctctcaatcgctcaatgacctgattaacccaggctgatctgcacgtctacaccggcagccagatccagacgcatcagagcatcaacggttttctcggttggctcaacgatgtcaaccagacgcaagtgagtacggatttcgtactgatcgcgcgcgtctttgttgacgtgcggggagatcagaacagtgaagcgctctttgcgtgtcggcagcgggatcggaccacggacctgcgcaccagtgcgcttggcagtctcgacgatttccgcggttgcttgatcgatcagacgatgatcaaacgctttcaggcggatacggattctttggttctgcatgagaccagagctccaattattttataaacgaaaatgattactcctcagacccattacgattgatgggagagtgtaaccgttcttacgtagctccccgattgggagcattgttaggtagccaaattcggctaactgaggttcagattgaacctgctgtcaactacgacaagcccgcgcattatacatacttaaccaccgaacgcaagcgtattgctagtaaagtaaacagctttcgggttatctctcaagttcgttcagcgcatttttgacacgctctcttaaaccggctttctcgtcgctttcttctacagtattttcttcgtcttcagaagaagaggtggcattctcaaccgcgacgcctgggtcatcttcctcctcgacggattcgacgacggggagtggctgttttttgaaaaaatagtgttgtgttgattgtttaaaagcaggcgtttcagcatctactactgtgacttctgcttttactatccaaagcgcccatagctgcctggcatacccaccaaccaataccattcctgcaaaccacaggcaaatcagcaataaacaaatgacatatattatggtgctgtgtttttgtcgggagaagataccagggtgacccgtttctttctgctcacgcgcggcgatatagaattcaaacatgtcatttccccttcactgttgtttctggggaaatatttgcttcatcccgatataagtaggcactctcccccgccacctgccagagatgtactaacgttgaaaagccaacaacaccgtcagttttcaagtgatggcttttttgaaattgctttattttttctaccaacaagggacgccactctgccgaagattctgtcgaaatatgcaatgcgcggtttaacatcgtttccagccagagaatctcttcctcgctgctatcatgcgtaatggtactctccccttccggcgacattttccacaacagaagataatcacccgtccataccaactcaaaccatttatgtgtcagcgtccaggtttgctgccctacgagtacatcaacggtagcatcaccgacgcgaacgaccacaacaggcaattttttgtccccgactttaagcgatgcgatccagggcaaattctgatccaccaatgtttgtaaagaagcattcccacttttacataccagccccgctcttactgcctgatcgcaccaggccgaatcggctgggacctcgtacccccatacgccgtataacacgcttagcgcctcactatcgcgcatcaccacatgggcaatatccttagtcatatcttgtttagctactggcgttacgggtatcagccacgcaggaacgggtaacggagctgtgaaagaggacagcagtagccaaccacaggtaagtgcgataatggttccactcatcaccacggcaagctgcattttccgggggcggttatcacctaatacgcggtaaatcattcgccattgttttgcagtgaaaacgcgggtctgctcggcttgctgtaataagctaattgtttcgccggcaagcgccagctttctgcgatctccccgacataataaagctatccgtttcagaactctggcggttaaaaggagatcgggctggtcaatattctgaccttcaaggatgcttgccttaagctcgtgctccgtcagacgacctgtcgagacaagttcaatgccctgttttttaaaatcacgttcaacttttcgatcgggtctgccgatcagcaaaaattgaccgtcaggaataagagatatcgcgcgttggagatcatcaagtatgcggcggtgattcaggtgagcattttcaataataataagagggcagcgactatcagttcgatgaagtgcatgcagtaattgacccgccatctcatctcgcgtccaggcgctgtcacggcagccctgttcagccgcattatcgtcggtaacgatccatgcggccttaccttgccaggaaacaacgaggcttaaagtaatcacacggcgatgtttatctttttgtagttgctgcgccagccaggtttttccacttccagcctcacccaacaaatagcacagacgccaggtctgacgtttctcacgcaaccaggaaagaatgacttctcttctcgtagacatagaacttcctgttttaattattgattatccttaatcataaaaataatgtatgtatttattaattaaatacatattactaatataaataaattttgcttgattcatgcaagcggcattaatactatttatactaacgtcaatatacaacccacccaatctattttattagaacatacatcgtgcccacactacctttccctttccatctggcgaatcataataaagatgctgccatcaatatattgattatatttataagcatagggttgattatttttaatgtgaattatttccatacaactatagttaaaaatgaacagatcattaatcaaccaacaaatgcatttcagtctgaattcagccttgccgctttatggcgcaacgaaaatcatgctggggtaaaagatgcaaatcccgtggcagttaatcaggaaacacctaagctctctatagcgcttaatggcattgtactcacatcgaatgatgagacttcttttgtcttaattaatgaggggaacgaacaaaagcgatactccctcaacgaagcccttgagtcagcgccgggaacgtttattagaaaaataaataaaaccagcgttgtgtttgaaactcacgggcattacgaaaaagtaactctccatccagggctacctgacatcatcaagcagcctgattcggaaaatcaaaatgtactcgccgattatattatcgccacacctatacgtgatggagaacagatatacggtcttcgattgaatcctcgtaagggtctcaatgcatttaccaccagcttgctgcaacctggggatatcgccctcaggatcaataatctttcgctgacccaccctgatgaggtttcacaggcattaagtttactgctaactcaacaaagtgctcagtttacaattcgtcgcaacggcgtaccccgcttgataaatgtttccgtcgcggaacttacaggaatgaatggacagcgcaatgaagggactcaataaaatcacctgctgcttgctggcagcactacttatgccttgtgcagggcacgctgagaacgaacaatacggcgctaacttcaataacgccgatatccgccagttcgtggaaatagtgggtcagcatcttggcaaaacgatcctgatcgacccttcggtacagggaaccatttccgtacgcagtaatgatacgtttagccaacaggagtactaccagttctttttaagtattcttgatctttacggttattccgtgatcacgctggacaatggttttctgaaagtggtgcgctcagctaatgtaaaaacatcgccagggatgattgctgacagttctcgtccaggcgtaggtgatgagttggtcacccgaatcgtaccgcttgagaacgttcctgctcgtgacctggctcccctgctccgccagatgatggatgcgggtagcgtcggtaatgttgtgcattatgaaccctccaacgttcttattctgaccggtcgtgcctccaccattaataaactgattgaagtcataaagcgcgttgatgtcatcggcacagagaagcagcaaattattcatctggaatatgcatcagcggaagatctcgccgagattcttaatcaattaatcagcgaaagccacggtaaaagccagatgcctgccctcctttccgcgaagattgtggcggataagcgaaccaactctcttatcatcagcgggccggaaaaagcacgccagcgcataacttcattactgaaaagccttgatgtcgaagagagcgaggaaggaaatacccgggtctattacctgaaatatgctaaagccacgaatctggtggaagtgctaaccggtgtttccgaaaagctgaaagatgaaaaagggaattcgcgtaagccttcttctacttctgcgatggataatgtggccattaccgccgatgaacagaccaactcgttggtcattaccgctgaccagtccgtccaggagaaactcgccacggtaattgcgcgtctggatattcgccgtgcacaggtgctggttgaggcaatcatcgtcgaagttcaggatggaaatggactcaacctcggcgtgcaatgggcgaataaaaacgttggcgcacagcaatttaccaatacgggattaccggtttttaacgctgcgcaaggtgtagctgattataaaaagaatggcgggatcaccagcgcgaatcctgcctgggatatgtttagcgcctacaatggcatggctgcaggcttcttcaatggcgactggggcgtattgttgactgcgctggccagtaacaataaaaatgacatcctcgccaccccgagcatcgtaacgctggataataaactcgcgtccttcaacgttggtcaggatgtgccggtgctatccggctctcagaccacttctggggataacgtctttaatactgtcgaacgcaaaacggtgggcacaaaactcaaagtcactccgcaggtcaatgaaggcgacgcggtactgctcgaaatagagcaggaggtttccagcgttgactcttcgtctaattcgacgctcggcccgacatttaacacccgtactattcaaaacgccgtgctggttaaaaccggtgaaacggtggtcctgggcggattgctggatgatttttctaaagagcaagtgtcaaaggttcctctgcttggcgatattcctttagtgggacaactcttccgctatacctcgaccgagcgcgctaaacgcaacctgatggtatttatccgtccgacgattatccgtgacgatgatgtttatcgctcactgtcaaaagagaaatacacccgctaccgccaggagcaacagctgcgaatcgacgggaaatcaaaagcgctgattggctcggaagatttgccggtgctggatgagaacacgttcaacagtcacgctcctgcgccatcgtcacggtgaggcattcttatgagaattcactcaccgtaccccgccagttgggcgctggcacaacgaattggttatctctattcagagggcgagattatttatctcgccgatacgccattcgaacggttactcgatattcaacgtcaggttggccagtgccagaccatgaccagcttgtcacaggctgattttgaagcccggctggaagcggtgttccatcagaataccggtgagtcgcaacagattgcgcaggatatcgatcaatccgtcgatcttctctcgctttcggaagagatgcccgcaaatgaagatctgctgaatgaagattcagccgcaccggttatccgcttgatcaatgctattttgagtgaggccatcaaagaaaccgcctccgatatccacattgaaacctatgaaaaaacaatgtcgatccgttttcgcatcgacggcgttttgcggacaattttacagcccaacaaaaaactggcggcactgcttatctcccgaattaaggtcatggcgcgtcttgatatcgccgaaaaacgtattccacaggatggaagaatcagtttgcgtatcgggcgacgtaacatagatgtccgcgtatccacactgccatccatctatggtgaacgcactgtgctccgcctgctggataaaaacagcctccagctttcattgaacaacctggggatgacggcagcggataaacaggatttagaaaatctcattcagcttccgcacggtattatcctggtaacagggccgacaggctccggtaaaagcaccacgctctacgccattctttcggcgcttaatacccctggccgtaatattctgacggtagaagatcccgtggaatatgaactggaaggcataggacaaacgcaggtgaatacccgcgtggatatgtctttcgctcgcggcctgcgcgccatacttcgccaggacccggatgtcgtcatggtgggggaaattcgtgatacagaaaccgcgcaaattgcggttcaggcctcgctcacaggccatctggtactctcaacactccacactaacagtgcatcaggcgcagtcacccggctacgcgacatgggcgtcgaatcattcctgctttcgtcttcactggcagggattatcgcgcaacgtctggttcgtcgtctgtgtccgcaatgccgacaattcacgcccgtatcgccgcaacaatcgcagatgtttaaatatcatcagctcgcggtgacaacaattggcactcccgtaggttgccctcattgccatcaatccggttatcaggggcgcatggcgatccacgaaatgatggtggtgacgccggaattgcgggccgctattcatgaaaatgtggatgaacaagcactggagcgactggtccggcaacaacacaatgccttaatcaaaaatggcctgcaaaaagtgatacgcggtgacacctcctgggatgaggttatgcgcgtcgccagtgccacgctggagaacgaagcatgaattatcgctatcgcgccatgacccaggatggtcaaaaattgcaggggatcattgatgctaacgatgaacgtcaggcacgactgcggctgcgtgaagaagggcttttcctgctggatattcgcccccaaaaaagttcgggagtaaaaacacgtcgcccgaggatcagccatagtgaactgacgcttttcacccggcagttggcaaccttaagcgcagcggcattacccctggaagagagccttgccgtaattggtcaacaaagcagtaataatcgactggctgacgtgttaaatcaggtacgcagcgccatccttgaagggcatcccctttccgatgcgttacaacattttcccacgcttttcgattcgctctaccgtaccctggtaaaagcgggcgaaaagagcggtctgctggccccggtgttggaaaagctggctgattacaatgaaaaccggcagaaaatccgcagcaagctcattcagtcactgatctacccctgcatgctcactacggtggcgattgtggtcgtgattattctcctcactgctgtcgtgcccaaaattaccgaacagttcgtgcatatgaagcagcaactgccactgagtacacgcattcttttaggtctgagcgacacgttgcaacgtaccggcccgacattattagcgacggtgtttattgtcgctgtgggtttctggctctggttaaaacgcggcaataaccgccaccgttttcatgccatgttactgcgcgttgcgctcatcggcccgctgatttgcgccattaacagcgcacgctatctccgcactttaagtattttgcaatccagcggcgtccctctgctggatgggatgaatttgtccaccgaaagcctcaacaacctcgaaattcgccagcgcctggcaaatgcggcagaaaacgttcgccagggtaacagcattcatctttcactggaacaaaccgcaattttcccgccgatgatgctctacatggtggcctctggcgaaaaaagcgggcaactcggcacgttaatggtcagagccgcagataaccaggagacactccaacaaaatcggatcgccttaacgctctccatcttcgagccagcactcattattacgatggcactgatcgtcctgtttattgtcgtgtcggtactccaacctcttcttcaacttaactcaatgattaattaaggaaagtatatgcgcgcaacggataagcaacgcggttttacattactggaaattatggtggttattgtcatcattggcgtacttgccagcctggtggttcccaacctgatgggcaataaagaaaaggcggataagcaaaaagccgtcagcgatatcgtggcactggaaaacgccctggatatgtacaaactcgacaatcatcgctatccaaccacaaatcaggggcttgaatccttagtcgaagcgccgacactgccaccgctggccgcaaactataacaaggaaggttatatcaagcgtctgcctgccgatccctggggcaatgattatgtcctcgttaatcctggtgaacatggtgcatacgatctgctttcagcagggcccgatggtgaaatgggaaccgaggacgacatcaccaactggggtttgagcaagaagaaaaagtaagtcagcgatgaatcagcaacgcgggtttaccctgctggagatgatgctggtgctggcgctggtcgctatcacggcaagtgtggtgctcttcacatatggtcgggaggatgccgccaacactcgtgcgcgcgaaacagcggcgcggtttaccgctgcacttgaattagccatcgaccgcgccacgctcagtggtcagcctgtcggtatccatttctctgattcagcatggcgcattatggtaccgggcaaaacaccatcagcctggcgctgggttccattacaagaagatgccgcagacgagagcaaaaatgactggggtgaagaactctcaattcaacttcagccatttaaacctgatgacagcaaccaaccgcaggtggtgattctggccgacggacaaatcacgcccttctctttgttgatggctaataccgggaccggtgagccgctcctgacgttagtcagttcaggctcatggcccctggatcaaacgctcgccagagatacccgcccatgaacaaacaatcagggatgacactgcttgaagtcttactggcgatgagtattttcaccgctgttgctctgactttaatgagcagtatgcaagggcaacgaaatgccatcgagcgaatgcgcaacgagacgctggcattgtggatagcggataaccagcttcagtcacaagattcattcggcgaggaaaacacgtccagttctggcaaagagttaataaatggcgaagagtggaactggcgcagcgatatccactcaagcaaagacggcacgcttctggaacacaccataacggtgacattacccagcggtcagacaacctcgcttacgcgctatcaaagcatcaataataaatccgggcaggcacaagatgattaatcgccagcagggtttcacattgctggaagtcatggcggcgctggcgattttctcaatgcttagcgtgctggcgtttatgattttttctcaagtttccgagttgcatcaacgttcacagaaagaaatccagaagttcaatcagctacagcgcaccatcaccattcttgataacgatctcctgcaactggtcgcccggcggaatcggagtacggacaaaatcatggtgttgggtgaagaagcgatttttaccacgcaaagtcgcgatccgctggcccctctcagtgaagcacaaaccttactcactgttcactggtatctgcgaaatcatacgctctaccgtgctgttcgtacttctgtggatggcaggaaggatcaccccgcccaggcgatgctggaacatgtcgagagctttcttctggaaagtaacagcggagaaagccaggagcttcctctctcagtcacgttacatctgaagactcagcaatatggggcgttacagcgccgttttgcattacctgagcagttagcgagagaagagtcgccagctcagacgcaggccgggaataataaccatgaataatgaacaacgcggcgtagcactgctcattgtactcatgttactggcgctcatggctgctctggctgcagacatgacgatcagttttcacggccagcttcatcgaacccgccaggtaaaccatcatttgcaacggcaatatgatattgagctggcggagaaacttgcgcttgccagcctcacccaggacgttaaagataacgacagacaaaccacgttgcagcagtactgggcacaaccgcaacagttgcagctggaaaatggcaatacagtgaagtggcagttacgcgatgcccagcactgttttaatctcaatgccttagcaaaaatctctgacgccccgctggcttcccctgatttccccgtccaggtattcagtgccctgctgattaacgccggtatcgatcgcggaaacaccgatgagatcgtgcaatcaatcgctgactatattgatgccgatgattcgccacgctttcacggcgcagaagataacttttaccaaagccaaacgccgcctcgccatagcgccaatcaaatgctttttctgaccggtgaattgcgtcagataaaaggcataaccgaaaacatctatcagcggcttatcccgtatgtctgcgttctcccgacctcggaacttagcatcaatcttaatatgctaacggagaacgatattccgctcttcagagcattattcctcaataacatcacggatgctgacgctcgggtcttattacaaaaaaggcccagggaaggctggctcaccacagatgcatttctttactgggcgcagcaggatttctccggcgtgaagcccctggttgctcaggtgaaagggcatctctttccctatagccgctattttacgctgaatacggaaagtatcagcgacgaacaatcctagggatggcaaagccatatttttttcaaccgtaaacagcagagcgcccaaatctatcggcgtacgctgcaactctactaatcataaggatcgtgatgcctgaatcgttgatggtaatacgttctttctcgacgctgcgtaagcattgggaatggatgacgttctccgcagatagcgtatcttcggtacatacgctcacagacgatcttccgctggagtcgctggccgatcagcccggtgctggaaatgttcaccttttgatcccacctgagggtcttttatatcgttccctcacgctgcccaacgccaaatacaaactcaccgcgcaaacattacagtggttggcggaggagacattacccgacgccagccaaaattggcactggacggttgtcgataaacaaaacgaaagtgtcgaggtgataggcattcagtcggagaaactcagtcgttatcttgagcgtttacatactgccggactcaacgtgacgcgggttttgccagatggctgctatcttccctgggaagtagatagctggactctggttaaccagcaaacaagctggcttattcgcagtgccgcacatgccttcaacgaactggatgaacactggttacagcatcttgctaaccagtttccgcctgagaatatgcgttgttatggtgtagcgcctcacggcgttgcagcggccaatccacttatccagcatcctgaaataccatcactgagtttgtattctgccgatattgcattccagcgctatgacatgctgcatggtgtttttcgtaaacagaaaactgtaagcaaatcgggaaaatggctcgcccgcctggcagtaagctgtctcgttctctccattctttcttttgttggcagccggggcatcgcgttctggcaaacgcttaagattgaagataaacttcagcaacaacagcaagaaacctggcaacgttatttcccgcagatcaaacacacccacaactttcgtttttactttaagcagcaactcgctcagcaatatcctgaagctgtaccgttgctctatcatttacaaacacttctgcttgaacaccatgaactgcagttaatggaggcgaactatagccagaggcaaaagtcgctgaccttaaaaatgagtgctaagagtgaagccaatatcgatcgtttctgtgagttaacacagtcctggcttccgatggaaaaaacagaaaaagatccggtcagtggcgtatggacagtaaggaactcagggaaatgattaaatcatggtgggcagaaaaatccacatcggaaaaacagatcgttgcggcattggcggttctctcgctcggcgttttttgttggcttgcggtgataaaaccgatagatacctacattgaagagcatcagtcccacgcgcaaaaaattaagaaggacatcaaatggatgcaggatcaagcgagcacccatggtttactcggtcatccagcgcttacgcagcccatcaaaaatatccttctcgaagaagcaaaacgtgagaatttgactatcacgctggaaaacggtccggacaatactctgacaattaaccctgtcacagctcccctcgaaaacgtctcccgctggctcactacggcacagataacatacggtattgttattgaagaccttcagtttactcttgccggaaacgaagagatcaccctcaagcatttgtccttcagggagcaacaataatgacaatgctactgccgctcttcattctggttggttttattgcaggttattttgttaatgtcatggcctatcacctctcgcctttggaggataaaacggcgttaacgtttcgccaggtattggttcatttctggcaaaaaaaatatgcctggcatgatacagtgcccctgatactttgcgttgctgctgctatcgcctgcgccctggcacctttcacgcccattgtgactggcgcactctttctctatttctgtttcgcactcacgctcagtgttattgattttcgcactcagctcctgcccgacaaactcaccttaccgctgctctggcttggcttggtatttaatgcgcagtctggattaattgatttacatgatgcggtttatggcgcggtcgctggctatggggtgctgtggtgtgtttactggggcgtctggttagtttgtcacaaagagggattgggctacggtgatttcaagctactggccgctgcaggcgcgtggtgtggctggcaaacgttaccaatgatactgctgattgcctcgctgggtggcattggttacgccatcgtttcacaacttctgcaacgccggactatacccactatcgcattcggcccgtggcttgcgctcggcagcatgataaacctgggatatctggcctggatctcttattaaccgggagggttctccctcccgacacggctcaaccttcttcgcgaatctgtgcttgcagataattttgcagtcccatcttctgaatcagatcaagttccgtttccagccagtcgatatggccttcttcatcgcgcaaaatttctatcatcatatcgcggctgacgtaatcatgaacgctatcggcataaccaattgcctcacgcaaattcttcgcgccatccagctcaagtgccagatcagaacgcagcatttcctcaacatcttcaccaatgttcagtttgcccaggtcctgtaagtttggaagaccttccagaaaaagaatgcgctcaatataacgatcggcgtgtttcatctcatcaatggattcatgatactccacatcattgagacgtttgagaccccagtttttaaacatccgggcatgaagaaagtactgattgattgcgacaagctcatttcccaacagtttgttgagataatttataactttagtatcacctttcattttttgactccttcgcttccactctttgaagcgtagaacggcttacgagtaagtcaaaaaacacactccgtttatgcggactccttaaactccggcagttgcattaattcatcctccatcacttcacgcgcggcccggacacatttaccgcactgattgccgaccggaatgaatttttttaattgctggaacgagtggggggaaaactggcgcacagcctgacgaatttttttatcgctgataccattacaaagacaaacgtacatagagactcccgtatactttcttcaaaaataaatgaaaatagttcttatttcaattacggaaagactcttttttaagcaaagaatagaaatatgaataaaaataatgggctaccaaaagtagcccattgacaaaaaatgcggcgataccggaaggtatcgccaacacatttattgcttagtaaacggcgcgaagatttcgctaaatgcgtacttcggtgcctgttctttagtcaggccgtggaattccggagacaggttagtgccgcctggcaggtcgcgcgcgattgaccagataccaaccataccgagattacgcttctgcgcatcctgcatgaccagacgagcatcagagagatagaacacctcgccctgaacgtcgttcacgccaaccatcggcgtggtacccatcatagcgtcaatttctgcatcgctcttgttgggatggaggcctttcaattgtgaatgcaggttggcaatcgcagacgttgcacacttaccgtgaatgttctggccttcggtatttgcagactgacaaatcgcgttaccgtagtccattgtcatcacgttcacacccgccagctcaacacctttcgctttggcatcgctcaggacattcatcccttccggcgtcaggccagtcggcagaattggcaaggtgtaccagatagcaatatctttgccctctgacttccatttatcctgcactttcttcacagcaaggttacgacgttcaatagatgcctgatccgcaacccaggtgccttcgatatcgaagtccaggactctgaggttcaggttatcaacgatgtcataataatgctgcattagatcgtcaacgttcttacaggaagctgccagcggggcattattagcaccaccgatagacagcatcacatcaccgccagcctcacgcagagctttgattttgctgtactgagcgtaattctgcataccgtaagcggtaccccatgtcggtagacaggtgttcgcatctttactcaccacaaacgccagcgtgaagtggttgacgttatgattcttagccagcgcagccaaatccgggatcgtattcagcgtaaagtcgacatacggtgcataaacgtgtttcggccacgctttcttcggcgtacctacgcgctctttggttccggtccagtcaacaaaaacacgccacgggttgctgtcagaaggagaaactttctgcactttactctgagaaatgtagttctcaccgttaaagcgaatcagcgtatcactggcataaagcgtttctggattaaactgcggcgcattattcagctcttcgttgctatagctctgagtcttacctaacggcttccacgggcgactattgctaccggtggcgttttggttcgcaaccagagcagggttgtcactttgcgtccagaacagcgcttcataagcctgcccatcaacaacaacgcgatcacctttcacgtacacggtggaagcggaccatgctttcgccggttcgtatttcttccacgggttatcgccgccggggacaaagccccatgcgtcttgatcgacagaggttttataatgtgcatcgttataatctacgatgctgttcgcgctgtacgctttgctggcctggaaaccattcgcaataatgacgccgccattatcaatttcacaggtagtcgggttaccgtactgactcatttccgcagcggtagctgtacgcacgaggcgccatgggttattggagttttctacactggtgccacgcgggcaatcttcagaaccaacccaccaggcattctgataaacattaccattgaagataacatggtaaatttcgctgccttcctggccactccacgcctgcagtgagtaatcgttactgctatccgctggtgttgatggctcgttgttatccggagttggagtaactggagtttccggtgtttccggagttggatcaaccggagtcacagcaccgccattattatccggcttaacggaacaggagcctgggttaccatactgagtgatttctgttgccgttgccgcgcgaacataacgccatgggttgctggcatcgttttctttcgcatcgcctgggcaatttgccgcgcccacccaccaggcattcttataaatgccgccgttgtagataacgtaccatgtagaagaaccttcctgacctttccaggctacgacagcatagttgtcgtttgacttatcagctggggctggctgaacatcaggagccggtttaacgtccggtgccggtttcacatccggtgcaggctgtggtgctgaagtacaagactgtggattactggtttctgagatttccgttgccgtagcggcacgaacataacgccatgggttgctggcatcattgcctttcgcatcacccgggcagttagaagaggctacccaccaggcatttttatataccgcaccattaaagacgacataccaggtttgaccgccctgctgtttattccaggcaactacagaagaattagacggaacagtgccctgtgctggtgtagccgaaccgccattagcaggcgtattagatgctggcgtatttgaatttgaagaagatgagctgccgctcttttcgcaggaaagtgtattgccaaactgactaatttcagcagctgttgcggtacgctttaaacgccacgggttagttgcatcatttgctttcgcttttcccgggcaatttgtagaagaaacccaccaggcattttcataaattttgccatcgaaaataacctgatatttattaccaccttgttggttattccatgcttccattgccaatgctggcagagcggaacacaccagccccataccaatcatagatttagtaaatatatttaatttcattataatcccttgtaacgtaaaaactgcaaaacaaaagtcctacgcaggaattatttacgttttacgagaacccttcaatatgaattaaagtgcggcattaaaaataagaaaaaagcctgacaaatgaagcattttaaaaacagaaacattcatatttaaaatattaaattgaattgatattttaaatatgaataatttattcgttctgacagtacgaataagatatgcagtcaacaaatgcaaaaagggcgccgaagcgcccttttcaattcaaaactaattaacgtgtaattagcccagaactttagcaacaacgcccgcgccaacggtacggccgccttcacggattgcgaaacgcagaccgtcgtccatcgcgatcgggtggatcagggtaacaaccattttgatgttgtcgcccggcattaccatctctacgccttccggcagttcgatggtaccagtcacgtcagtagtacggaagtagaactgcggacggtagcctttgaagaacggagtatgacgaccgccttcatctttggacagaatgtacacttcagattcgaacttggtgtgcggcttgatggtgcccggcttagccagtacctgaccacgttcgatttcttcacgtttgataccacgcagcagaacacctacgttctcaccagcacggccttcgtccagcagtttgcggaacatttcaacgccagtacaggtagacttctgagtctctttgataccaacgatttcaacttcttcaccaactttgatgataccgcgttctacacgaccggtaacaacggtaccacgaccggagatggagaatacgtcttcgatcggcagcaggaacggcttgtcaatcgcacgctctggttccggaatgtaagaatccaggaagccagccagttccaggattttcgcttcccactctgcgtcgccttccagcgctttcagagcagaaccacgaacgatcggagtgtcgtcgcccgggaagtcgtactgagacagaagttcacgaacttccatttcaaccagttccagcagctcttcgtcatcaaccatgtcgcatttgttcaggaacacgatgatgtacggaacgcctacctgacgacccagcaggatgtgctcacgagtctgcggcatcgggccgtcagtcgcagcaactaccaggatcgcgccgtccatctgagcagcaccggtgatcatgtttttaacatagtcggcgtgccccgggcagtctacgtgcgcgtagtgacgggtcggggtgtcgtattcaacgtgagaagtgttgatggtgataccacgagctttttcttccggcgcgttatcgatctggtcgaatgcacgagcagcaccgccgtaggttttagccagtacggtggtgattgcagcggtcagagtagttttaccgtggtcaacgtggccgatagtaccaacgttaacgtgcggttttgtacgttcaaatttttctttagacacggctatattccttactatagtgctctccccttcaggagagagcacgggactttggtattaacccttaggcttatttaccacgggcttcaattacggcctgagcaacgttactcggcgcttcatcatacttcaggaattccatagtgtatgatgcgcgacctttggtcagagaacgcagctgagttgcatatccgaacatttcagacagcggtacttcagcgtggatcttaacgccagtaacttcagattcctgacctttgagcataccacgacgacggctcaagtcaccgataacgtcaccggtgttctcttcaggagtttctacttcaaccttcatgatcggctcaagcagaactggtttcgctttcttaaagccttctttaaaggcgatagaagcagccagtttaaacgccagttcagaggagtcaacgtcatggtaagaaccgaagtgcagacgaatacccatgtctactaccgggtagcctgccagcggacctgctttcagctgttcctggatacctttatcaacggccgggatgtattcgccagggattacaccacctttaatgtcgttgatgaactcgtagcctttcgggtttgaacccggctccagcgggtacatgtcgataacaacatgaccatactgaccacgaccaccagactgtttcgcgtgtttaccttcaacatcggtaactttctggcggatagtttcacggtaagcaacctgcggtttacctacgttcgcttcaacgttgaattcacgcttcatacggtcaacgatgatgtcgaggtgcagttcgcccatacccgcgatgatggtctggttagattcttcgtcagtccatacacggaaagacgggtcttctttagccagacggcccagagccagacccattttttcctggtcagctttggttttcggttcaactgcgatggagattaccggctcagggaattccatacgttccagaatgatcggcgcatccgggtcacacagggtgtcaccagtggttacgtctttcagaccgattgcagctgcgatgtcgcccgcgcgaacttctttgatctcttcacgtttgttagcgtgcatctgaacgatacgaccgaaacgctcacgtgcagctttcacggagttcagtacggtatcaccagagttaaccacaccggagtacacacggaagaaggtcaggttaccaacaaacgggtcggtagcgattttgaacgccagtgcagagaacggctcgtcatcacttgcgtgacgctcagccggagtgtctttaccgtcgtccaggataccgttgatcgcaggtacgtcaaccggggatggcaggtaatcaattaccgcatccagcatcgcctgaacacctttgttcttgaacgcagaaccacaggttaccaggatgatttcgttgttcagaacgcgctgacgcagagcacctttgatttctgcttcagtcagttcttcaccacccaggtatttttccatcagctcttcagaagcttcagctgcggattcgatcaggttctggtgccattcgttagccagttcaaccatgtctgccgggatatcttcgtattcgaaggttacgccctggtcagcgtcgttccagttgatagctttcattttcaccaggtcaacaacaccggtgaaatgttcttcagcaccaatcgccagctgcagcggaaccgggttcgcgcccagacgggttttgatctggttaacaactttcaggaagttcgcacccatgcggtccattttgttaacgaacgcaatacgcggaactttatatttgtttgcctgacgccatacggtttcagactgcggctgaacaccaccaactgcgcagtaaaccattaccgcaccatcgagaacacgcatggaacgttctacttcgattgtgaagtcaacgtgccccggggtgtcgatgatgttgatgcgatgcggctcatactgcttagccataccagaccagaatgcagtagtcgcagcggaagtgatggtaataccacgttcctgctcctgctccatccagtccatggttgcagcgccgtcatgaacttcaccgattttatggtttacaccggtgtagaacagaatacgttcggtagtagtggttttaccggcgtcgatgtgcgcactgataccgatgttacggtagcgtgcgatgggtgttgtacgagccatttgtttcctcgtttatcttttaggcgttcaatttaagtagcccaaagcgggctgcttactggaagcgcccgcctggtgactaaaactccgaagggattaccaacggtagtgtgcgaacgccttgttggcttcggccatacggtgaacgtcttcacgtttcttaactgcagtacctttgttttctgcagcatcagaaagttcgttcgccaggcgcagagccatggatttatcaccgcgtttacgagcagcttcaacgatccaacgcattgccagagcattacgacgaaccggacggacttcaactggtacctgataagtagaaccaccaacgcggcgagacttaacttctacagtcgggcgcacgttttcgagagctacttcgaatgcttccagttcagatttaccagagcgctgagccagggtctccagcgcgctgtatacgatagattcagcagtagattttttaccatctaccatcaggatatttacaaatttagccagcagttctgatccgaacttcggatccggcagaattttacgctgaccaatgacgcgacgacgtggcatggaaatactccgttgttaattcaggattgtccaaaactctacgagtttagtttgacatttaagttaaaacgtttggccttacttaacggagaaccattaagccttaggacgcttcacgccatacttggaacgagcctgcttacggtctttaacgccggagcagtcaagcgcaccacgtacggtgtggtaacgaacacccgggaggtctttaacacgaccaccacggatcaggatcacggagtgctcctgcaggttgtgaccttcaccaccgatgtaggaagtcacttcgaaaccgttagtcagacgaacacggcatactttacgcagcgcggagttcggttttttaggagtggtagtatatacacgagtacatacgccacgtttttgcgggcatgcttccagcgcaggcacgttgcttttcgcaactttgcgagcacgtggtttgcgtaccagctggttaactgttgccattaaatagctcctggttttagcttttgcttcgtaaacacgtaataaaacgtcctcacacaatatgaggacgccgaattttagggcgatgccgaaaaggtgtcaagaaatatacaacgatcccgccatcaccaggccatctggctggagtgcttaaccgtaagtctgacgaaatcagtatagtcaatgggaatgatgtcgttcgaaattcgaccagtcaaaccgcgggcaataaggtcttcgttcagagcatagaccttaatgggggcattacgcagactttcaaggtagcggttgccgtcaactgcggcagttacgccatcttgcaataatagcagttcgtcaccttcactgagcagacgcagcagcgcagcaaaatccgtcagccagggtgaacgatgtaatgtgtgcagcataaatgcctcaaaacctcaaaataacatcgtagttggcgagttcgcggcgtaaggcatctgcttcgagcggcgtggcttcgacaacaaaaggtgtctgcggatctaacccgcgttcgcgcagtgaagccgcacaaacccagcactgttcaatatcgtacagacccaacaatttaaaagtggcaatgtaatcacgcgccagcactgcatcgggcttttgtcctggcagcagctgaaaaacgccatcagcaataaagaagacggccagatcgtcagttaatgcggaagttgcgagtaaagcatctaatccctcgcggccagccgcggtgccatgaggcacagtagaaaaaacaaacgcaattcgtttcatcagaactgtaccaccctgtcacaggtcagcgaggcttccgccagcgcgccaagtccgcttaaggtaaatcccgtctgaaggtttgacgaagccagccccagtcttccggcttccgtttcatcaacaacgccacggcgtaatgccgccgctacgcagatattcagcgccacaccatgttgcatattcaactgttgccagctgcgcacaaggtcaaattcgtcgcttgccggtgaggtcaattggttagcgttatagaccccttcccgatagaaaaaaacgctgcttaactcatggccttctgctattagcgcctgcgcaaactgaaaagcactactcgcctgttgcgtaccgtatgctggcccggtcaccacgatggcaaaacgcattacttatcttgcccctggaaatcaccgctcttgaactggcggatgtagagatagacagtgtgtttggagatgttcaggcggtcagcaacctggttgatcgcgtctttaatatcgaagatccctttctcgtagagatttagcacgatctgacgatttttggcgttattagaaacattgcgatcggcattcacttcttcgatggtaaactccagcgtttgggtaaccagatcttcaacagaagaggcaaagttgacgcttgaaccgacatccggagtttccggcggcacaaaagtgctcataatctgcgagaagggaacatcaagattcatattgatgcacagcagaccaattacacgctgttcgcggttacgaatcgcgatagtcagggacttcattaatacgccgcttttggcgcgagtaaagtagcatttagaaacgctgctatccgctcccgtcatatcgtgcagcatacgtagcgccaggtcagtaattggcgaaccaatcttccggcctgtatgttcaccgttagcaatgcgaatggctgaacattttagatcctgcaaagagtgcaaaacgatttcacagtgggagccaataagcatcgctaacccgtccaccaccgcttcgtaggatttcagaatatcaaaatcggtctggtcaaaaggacgttgatccagtaaatccaactcactggtttcgttggttaaaagcgacctggacatgaaaaaaaacactccttttcaggagcctgtcgttaacttttcagggcaggctcattaatgatgcgggtaactaaattaatacagcggaggttccgctttccagcactaattatatccggcctgtaataaaaaaaccgccgcctggtcaggcggcggttcttagtgcttattttttagcagagtctgcggctttcgcatcagcttccggctttgcatcagccttcggcgctggtttcacatccagcagctctacgtcaaacaccagggtagaattcggtgggatccccggaacacccgctttgccgtaagccagttctggtggaataaccagtttgatcttaccgcctttcttgatgttcttcagaccttctgtccaacccgggataacaccgtccagacggaaagagagcggttcaccacgggtgtaagagttgtcgaactctttaccgtcgatcagcgtacctttgtagttcactacaacagtatcgctgtctttcggggcttcgcctttaccggcttctactacctgataaaccagaccagtggaagaggttttcacacctttctctttggcaaatttctcgcggtactctttaccttttgcttcgttatcagccgcgtctttttccatcttcgcctgagcagaagacttcacgcgagcttcgaatgcttgcagagtctgttcgatctcttggtcggaaagtttgctcttatcagcaaatgcatcctgaacaccagcgatcagctgatctttatccagtttgatgcccagtttttcttgttctttaagagagttttccatgtaacgacccagcgaagcacccagtgcataagctgatttctgatcgtcatttttgaacgctgctttgctgtcagcagttgtagcaggttttgcagcttcagcagcaaaagtgattggtgcatgcagggcaacggccattgtggtcgccagcagcgttactttaaacagtgatttcatccatatctccaggatcggggcatctcaccccagggttaactattatcagaagggtactataaagcgttgtcgaacaaatctacatacagacacgccctattatcatctattttcagactctttttgtttaaattagtttcgatgaccgcgaaatgagtgctgtctcgggcagcaaagttaagtagaatccgcggcgaccattcgacaaaagaggtgaatcatgcaggatttatcattggaagcacgcctggcagagctggagagccgactggcttttcaggaaatcaccattgaagaactgaacgtcacggtgaccgctcatgaaatggagatggcgaaactgcgcgatcatctgcgtctgctgaccgagaagttaaaagccagccagccgtcgaacatcgcgtcgcaggctgaagaaacgcctccgccacattattgaggcgtaaaaaaagcggggattccccgcttttttgtcaccttttcgatattagtggcaaccgcaaccgccgttgcctttaccgccacagcagccttcgccaccgtgttcatgaccgtgatcgtggccatgaccaccgcagcaaccgtcgtggtcgtgatcgtggtggtgatcgtgcgcgccgtgaacgtgaccatgagccagttcttcttcggtcgcttcgcgaatcgccacaacttcaacgttgaatttcaggttctgaccagccagcatgtggttaccatcaaccactacgtgatcgtcttcaaccgcagtgatttcaaccggtaccggaccctggtcggtttcagccaggaaacgcatacctacctgcagttcatcaacgcccataaatacgtctttaggaacgcgctgcaccaggttttcgtcgtactgaccgtaagcgtcgttcgcgccaacagcgacatcaaatttgtcgccaacttcatgaccttccagcgctgtttccaggccagagatcagggaaccgtgaccatgcaggtagtccagcggcgcactcaccggagactcatcaaccaacacaccgtcttctgtacgtacctgataggccaggctgaccaccaggtcttttgctactttcatgatatctcctgagcatgggaagaatagtggcgcagattgtagcggaattctgcagccgtgtactcactagcttaaaaaaactcggcgcatatcgctagtccggatgaaaaatcccaatcacttgctcatctttgcggacgtgatcgcgggcttctttgtctgcttctcgcatctgatgtccacacttaacacattcaacgatatcaatattattttcgcgccacatcgccattgaatcctgtgcctgacaggccgggcattttgcgcccgcaataaaacgttttcggattgccatctttaccctctactcaaattcatcccagccgtccagctggcgtcgttcttgttgcatttcacgctggaaaatctcttccagttcacgtcgggcttccctggcgcgagaaatttgtacggtatcagcatgcatcgggattaactcccgcagcattcgcatatccaggcggcgaaaatgcagttgcgcgcgctgcgcctgatgcggatgcatgccaagcgtgaccagcgtcttgcgccccagctctaacgcactggagaatgtttcacgggaaaactgcgtcacccctgcctgtaataactcatgcgcttccacacgtccgcgcgctcgcgcaagaatatgcaaatgcggaaagtgctgctggcatatttccaccagcttcatagtgtcttccggctcgttacaggtaatgacgatagactcagcggcctctgcacccgcagaacgtaaaagatctacctgcgtggcgtcgccgtaataaactttgtagccatatttgcgcatcaggttaacggcactgatatcccgctccagtacagtaatgcgcattttatttgccatcagcaaacgaccaatcacctgaccaaaacgcccaaagcccacgacaatgacctgcggtttatcatcgttgacccatggtttttcgtcttcttcttccggtccgttaaactggcgggatagccatttatcgaccagcttcatcagcagcggcgtggtcatcatggaaagcgtcaccgtcaccagcaacagcgccatctggtcgccctggaataagcgttgtgaagaagcggtagaaaagaggacaaaggcaaactcaccgccctgactcaacacgccagcaaactgcatccgctcagaactgcgcacgccatacaatcgcgccagcagatacagcacgagaattttcaccgccaccagcacaaccacacttatcactacccacaacagatgggtataaagcaccccgaggttgagcgacatgccgacagagataaagaacaaaccgagcagcaagcctttgaagggatcgatagccgtttccagttcatggcgatattcactttccgccagtagcacacccgcaataaacgtaccgagcgccatcgacaaccccagcgcatccataaacaatgcggaacccaacaccagcagcagcgtcgcagcggtgaacacttcccgcacgccagaagctgcaataaaacggaataccggacgcagtaaatagcgcccgccaatcagcatgccgacaaacgccagcaccttcatgccgatcttcatccagtcgaaatgttcgtctgccgaacccgccaacaacggcactaacgccagtgccgggatcaccgccagatcctgaaacagcagtaccgagaaacctaactggccggattcgctgcgattcatccctttctcacgcatcaattgcaacgccattgcagttgaagacatcgcaaggccaatgccaccgaccaccgccgcctgccatgagaaatgggtcagcatcaataatcctgccagcaacgccgcgcttaacagcacctgtgccgcgcctacgccaaaaatcgaacgccgcagttgccaaagcttggagggattcaactcaaggccgatgataaacatcaggaataccacgccgagttccgaaaagtggaggatctcatcgacgtcgctaataaaccccagcccccacgggccaatcgcaatccccgccagcaaatatcccaacactgcaccaatacccagccgcgatgccagcggcaccgcagccaccgccgcgaagagaaacagcactcctgcgagtaaaaaatcagaaccttccatcagcggcctcctggagacagcggatttgccagccagtcaccgtaggctctggcgtggctcgccagctcctgtgcgctttgccgtctcgcccagtaaataatgatggggcttaaccaatgcatccggcacatgcccgccgccagttcaaaggggcgcagaacatcgctcatcgggtagcgattcaacgcgtcataacggtaagcactttccggctccccggtggtaatcacgctacgccagtactttcccgccagttggtttccccccggtccgctggcaaaaccacggcttaatacccggtccagccactctttcagtagcgccgggcagctataggtataaagaggatgctgaaagacaatcacctcgtgctcgcgcagtaatgcctgctcacgagggatatcaataaaaaagtcgggatagtgcgcgtaaaggtcgtgcacggtaacattgctgagctgcgtggccggtttaagcagaacccggtttgccaccgagtcctgagattccggatgggcatacagcagcaaaactttcgctggctgagacatcatccccctcccggtatggtttttgtgtatagtcgctgttttgggctaccattgcgcccggtgcggcagctcgcccatacattacattatcataatgataagttaacatagtctgaacatacggcgccttatgattgttttttcctcgttacaaattcgtcgcggcgtgcgcgtcctgctggataatgccaccgccaccatcaaccctgggcagaaagtcggcctggtgggtaaaaacggctgtggtaaatctaccctgctggcattgctgaaaaatgaaatcagcgccgacggcggcagctacacctttccgggaagctggcaactggcgtgggtgaatcaggaaacaccggcgttaccgcaagcggcgctggaatatgtcattgacggcgaccgtgaatatcgtcaactggaagcgcagctacacgacgccaacgaacgtaacgacgggcacgccattgcgaccattcatggcaagctggatgctattgacgcatggagtattcgctcccgtgccgccagcctgctgcacggcctcggtttcagcaatgaacaactggagcgcccggtaagtgatttctccggtggctggcgtatgcgtcttaaccttgcccaggcgctgatttgccgttcagacttgctgctgctcgacgaaccgactaaccacctcgatctcgatgccgttatctggctggaaaaatggctgaagagctatcagggcacgctgatcctgatctctcacgatcgcgatttcctcgatccgatcgttgataaaattattcatatcgaacaacaaagcatgttcgagtacaccggcaactacagttcgtttgaagtacagcgcgccacccgtctggcgcagcaacaagcgatgtatgaaagccagcaggaacgcgtggcgcatttgcaaagttatatcgaccgtttccgtgccaaagccaccaaagcgaagcaggcccagagccgcatcaagatgctcgagcgtatggagctgattgcccccgcgcacgtcgacaacccgttccgctttagcttccgcgcgccggaaagcctgcctaatccgttattaaagatggaaaaagtcagcgcaggctatggtgatcgcattattctcgactcgattaaactgaatctggtccccggctcgcgcattggtctgttaggccgcaacggcgcgggtaaatcgacattaatcaaactgttagccggcgaacttgcgccagtcagcggtgaaattggtctggcgaaagggatcaagctcggctacttcgcccagcatcaactggaatacctgcgcgccgacgaatcgcctcttcaacatctggcacgtttagcgccgcaggagctggaacaaaaactgcgtgactacctcggcggctttggtttccagggcgataaagtaaccgaagaaacgcgccgcttctccggtggggaaaaagcccgcctggtgctggcattaattgtctggcagcgtccgaatctgctgctgctcgacgaaccgaccaaccaccttgacctcgacatgcgtcaggcactcaccgaagcattaatcgagttcgaaggcgcgctggttgtcgtctcgcacgaccgtcatttgctgcgttccaccactgacgatctctacctggttcacgatcgtaaagtcgaaccgttcgacggcgatctggaagattatcaacagtggttgagcgacgtacaaaagcaggaaaaccagaccgacgaagcgccaaaagagaacgcgaacagcgcccaggcacgtaaagatcagaagcgtcgggaagcggagctgcgtgcgcaaacccagccactgcgtaaagagattgcccgtctggaaaaagagatggagaagctgaacgcgcaactggcgcaggcggaagagaaactcggcgacagcgaactgtacgatcaaaaccgtaaagcggagttgaccgcctgcctgcaacagcaagccagcgccaaatccggcctggaagagtgcgaaatggcatggctggaagcccaggagcagcttgagcagatgctgctggaaggccaaagcaactgatggcgcagataacaacgaccgatgccaatgaatttagcagcagtgctgaattcacccctatgcgcggctttagcaattgtcatctacaaaccatgctgccgcgtctgttccgtcgcaaggtgaaattcaccccgtactggcagcggctggagttgcccgacggcgattttgtcgatctcgcgtggagtgaagatcctgcacaggcgcggcataaaccgcgtttagtggtatttcacgggctggaaggcagtctcaatagcccttacgctcacggtctggttgaggcggcgcaaaagcgcggctggctgggcgtggtgatgcattttcgcggatgcagcggtgaaccaaaccgtatgcaccgcatttaccattcgggcgaaaccgaagacgccagttggtttttacgctggctgcaacgcgagtttggtcatgcgccaacggctgccgtcggctattcgctcggcggtaatatgctggcctgtttgctggcaaaagaaggcaatgatctcccgattgatgcggcagtgattgtctctgcgccgtttatgctggaggcctgtagttaccatatggaaaagggcttttcccgcatttatcagcgttacttgctgaacctgttaaaagccaatgccgcgcgcaagctggcagcctaccccggaacactgccgattaatctcacgcagttaaaatcggtacgtcgcatccgtgaatttgacgatctcatcaccgccagaattcacggctacgctgacgctatcgactattatcgtcagtgtagcgccatgccgatgctcaatcggatagccaaaccgacactgattattcacgccaaagacgatccgtttatggatcatcaggtgatcccgaaaccggaaagtctccccccgcaggtggagtatcagctgactgaacatggcggtcatgttggctttattggcggtacattacttcatccgcaaatgtggctggagtcacgcattcctgactggttaacaacgtatctggaggcgaaatcatgttgattccgtggcaagacctctcccccgaaacgctggaaaatttaattgaaagctttgtgttacgtgaaggcaccgattatggtgaacatgagcgtacacttgaacagaaagtcgccgacgtcaaacgccagctacagtgcggagaagcggtgctggtatggtcggagctgcacgaaacggtcaatatcatgccgcgcagtcagtttcgcgaataacctgcaaccgtcggcggacgagataataatgatagctaagtcatggagttactatgtctgccaaacatccggtcattgcggtaacaggatccagcggcgcggggaccaccaccaccagcctcgcgtttcgtaaaatattcgcgcagttaaatctgcatgcagccgaggtggaaggcgacagttttcaccgttatacccgcccggaaatggacatggcgatccgcaaagcgcgcgacgccgggcggcatatcagctacttcggccccgaagcgaacgacttcggcctgctggaacaaaccttcattgaatacggtcagagcggcaaagggaaatctcgcaaatatctgcatacctacgacgaagccgtaccgtggaatcaggtaccggggacattcaccccctggcaatctttaccggaacccactgatgtactgttttatgaaggtttacacggcggcgtagtcacgccacagcataacgttgcgcagcatgtggacttactggtcggcgtggtgcctatcgttaaccttgagtggattcaaaaactgatccgcgacaccagcgagcgcgggcactcacgagaagcagtgatggactcggtagtgcgttcaatggaagactatatcaactacatcacaccgcagttttcccgcacccatcttaatttccagcgcgttcccaccgtcgacacctcaaatccgttcgcggcaaaaggtatcccgtcgctggatgaaagctttgtggtgatccattttcgtaatctggaagggatcgatttcccctggctgctggcgatgttgcaaggctcattcatttcccacatcaatacgttagtggtgcctggcggcaaaatgggtctggcaatggaattaattatgctgccgctggtgcaacgattgatggaaggaaagaaaatcgagtaacgctgctattacgccggataaaatactatccggcttcacaacgggatagttaaatcacgcggcaaccacttcatacgagtgagtaatattcaccgctttttccagcatcagcgccactgaacaatatttctcggcagagagatcaaccgcacgtgcaaccgctgcgtctttcaggtcgcgaccggtaacgataaaatgcagattaatgtgcgtaaacaggcgtggtgcctcttcgcggcgttcagaggtcaattttacttcacaatcgaccacatcctgacgccctttttgcaggatagaaaccacatcgatggcactgcaaccacccgctgccatcaacaccatttccatcgggcttggtgctttatcgcctgagttgccgtccattaaaatctggtgaccagaggcggattcgcccagaaaagttaacccttcgacccacttcactcgcgcttgcatttttgctactccactgcgtcaattttcctgacagagtacgcgtactaaccaaatcgcgcaacggaaggcgacctgggtcatgctgaagcgagacaccaggagacacaaagcgaaagctatgctaaaacagtcaggatgctacagtaatatattgatgtactgcatgtatgcaaaggacgccacattaccgtgcagtacagttgatagccccttcccaggtagcgggaagcatatttcggcaatccagagacagcggcgttatctggctctggagaaagcttataacagaggataaccgcgcatggtgcttggcaaaccgcaaacagacccgactctcgaatggttcttgtctcattgccacattcataagtacccatccaagagcacgcttattcaccagggtgaaaaagcggaaacgctgtactacatcgttaaaggctctgtggcagtgctgatcaaagacgaagagggtaaagaaatgatcctctcctatctgaatcagggtgattttattggcgaactgggcctgtttgaagagggccaggaacgtagcgcatgggtacgtgcgaaaaccgcctgtgaagtggctgaaatttcgtacaaaaaatttcgccaattgattcaggtaaacccggacattctgatgcgtctgtctgcacagatggcgcgtcgtctgcaagtcacttcagagaaagtgggcaacctggcgttcctcgacgtgacgggccgcattgcacagactctgctgaatctggcaaaacaaccggatgctatgactcacccggacggtatgcaaatcaaaattacccgtcaggaaatcggtcagattgtcggctgttctcgtgaaaccgtgggacgcattctgaagatgctggaagatcagaacctgatctccgcacacggtaaaaccatcgtcgtttacggcactcgttaatcccgtcagagtggcgcgttacctggtagcgcgccattttgtttcccccgatgtggcgcagactgatttatcaccccgatatcaactatgcacttcgacaaacgctggtgctatgtttgcccgtggccgttgggttaatgcttggcgaattacgattcggcctgctcttctccctcgttcctgcctgttgcaatattgcgggccttgatacgcctcataaacgttttttcaaacgcttaatcattggtgcgtcgctgtttgccacctgtagcttgctgacacaggtgctactggcaaaagatgttcccctgccctttttgctgaccggattaacgctggtacttggcgtcactgctgaactggggccattgcacgcaaaattgcttcccgcatcgctgctcgctgccatttttaccctcagtctggcgggatacatgccggtctgggaaccgttgctcatctatgcgctgggcactttgtggtacggattgtttaactggttttggttctggatctggcgcgaacaaccgctacgcgagtcactaagtctgctgtaccgtgaactggcagattactgtgaagccaaatacagcctgcttacccagcacaccgaccctgataaagcgctgccgccgctgctggtgcgccagcaaaaagcggtcgatctaattacccagtgctatcagcaaatgcatatgctttccgcgcaaaataataccgattacaagcggatgctgcgtattttccaggaggcgctggatttgcaggaacatatttcggtcagtttgcatcagccggaagaggtgcaaaagctggtcgagcgtagccatgcggaagaagttatccgctggaatgcgcaaaccgtcgccgctcgcctgcgcgtgctggctgatgacattctttaccatcgcctgccaacgcgttttacgatggaaaagcaaattggcgcactggaaaaaatcgcccgccaacacccggataatccggttgggcaattctgctactggcatttcagccgcattgctcgtgtgctgcgcacccaaaaaccgctctatgcccgtgacttactggccgataaacagcggcgaatgccattacttccggcgctgaaaagttatctgtcactaaagtctccagcgctacgcaatgccggacgactcagtgtgatgttaagcgttgccagcctgatgggcaccgcgcttcatctgccgaagtcgtactggatcctgatgacagtattgctggtgacgcaaaatggctatggcgcaacccgtctgaggattgtaaatcgctccgtgggaaccgtggtcgggttaatcattgcaggcgtgacgctacactttaaaattcccgaaggttacaccctgaccttgatgctgattaccaccctcgccagctacctgatattgcgcaaaaactacggctgggcgacggtcggttttactattaccgcagtgtataccctgcaactgttgtggctgaacggtgagcagtacatccttccgcgtcttatcgataccattattggttgtttaattgctttcggcggtactgtctggctgtggccgcagtggcagagcgggttattgcgtaagaacgcccatgacgctttagaagcctatcaggacgcgattcgcttgattctgagcgaggacccgcaacctacgccactggcctggcagcgaatgcgggtaaatcaggcgcataacactctgtataactcattgaatcaggcgatgcaggaaccggcgtttaacagccattatctggcagatatgaaactgtgggtaacgcacagccagtttattgttgagcatattaatgccatgaccacgctggcgcgggaacaccgggcattgccaccggaactggcacaagagtatttacagtcttgtgaaatcgccattcagcgttgtcagcagcgactggagtatgacgaaccgggtagttctggcgatgccaatatcatggatgcgccggagatgcagccgcacgaaggcgcggcaggtacgctggagcagcatttacaacgggttattggtcatctgaacaccatgcacaccatttcgtcgatggcatggcggcagcgaccgcatcacgggatttggctgagtcgcaagttgcgggattcgaaggcgtaatacaggctaaaccatcggatgaggtgttcacgccgcatccgacatcttttgcctgatgcgtcttatttacgccccaaccaccttcgccaccgcgtgggcgaaacgatgcatcccttcatcgatatccgcatcttccaccaccagcgacggcgcaaaacgcatcacatcaggcccggcattcagcaccattacgccttcctctgcacccgcatacaggaaatcacgcgcccgacctttgtactgtggtttcagctctgcgccaatcaacagccccataccgcgaatatcgctaaacacatcgtactgctgatcgatcttctgcaaatggtcaacaaaatgctggcgtttcgcttgaataccttccagcacttcaggggtattgatgatatcaaacgctgcgcccgctactgcacaggccagaggattaccgccgtaggtggaaccgtgagaaccaggatgaaacgcggaagcaatctccgccgtggtcagcatggcgctaaccgggaagccgccgcctagcgctttcgcagaggtcagaatatccggcgtcacgccgtagtgcatataagcaaacagatcgccggtccgccccatcccgcactgcacttcatcaaacaccaataatgcctgatgctgatcacacagctcgcgcaagccctgcaaaaactctggcgtcgctgccgtcacgccgccctcgccctgaatcggctcaaccaccaccgcacaggtatggtcatccatcacggcttttactgcgtgaagatcgttaaaaggcacgtggatgatgtctgccggttttggcccaaagccgtcggaatattttggctgcccgcccaccgagacggtaaacagcgaacgaccatgaaaagcgttatggaaggcaataattttggttttgaacgggctatgacgcacacaggcgtaatggcgtgccagtttaaaggcggtttcgttagcttccgtgccggagttcataaacaccacgcgttcggcaaacgttgcctcaatcagtttacggccaagacgcagcgccggctcattggtgaaaacgttactaatatgccacagagtttcgccctgggtttttaacgcgttcaccagcgcaggatggcaatggcccaacgccgtaactgcaatgccacccgcgaaatcgacatactccttgccctgttgatcccagattcggctgccctgaccttttaccggaataaactctgccggagcataaatcggcagaatcacttcatcgaaagtcgcgcgtgtaattgctgtttgttcaattgccatctcatgatcaccctgttacgcataaataaatatgaaattataatcacaaaatatgcataaaaaatcactgaatggcaatcagaaatcagcgatgcagaaaattagccagcagttgatgtccttgttcgctaagaatactttctggatggaattgcacaccttccagatcccactggcgatggcgaatccccataatctcgcgggtttcgctccaggccgtcacttcaaagcactccggtaatgagtcaggttccaccaccagcgaatggtagcgtgtcacggtgagtggatttgccagccccttaaatacgcccacaccattatgtgtaatcggcgaggttttgccgtgcatgacctttgcggcgcgcacaactttgccgccaaatgcctgcgccattgcctgatgaccgaggcagacgccaagaatcggcaagcgtccggcatagtgacgaataacgtcaagggagatcccggcttcatctggcgtacaggggccgggtgagatgacaattttttgtggtttaagggcgtcgatatccgccaacgtcaacgcatcgttgcgcttaaccaacacatccgcccccagttcacaaaagtactggtagaggttccaggtaaaagaatcgtagttatcaataagcaggatcatggcggctccggtacgaaagaaccgcgctattttactcagattccccggcttcgcttaccactttgctaaatatcatctgcagcgcggtgagatcccccattgccccattctgatttgcctgattccaggcctctttttcgataccctgccagctcagttgatatccggcatgaatcgccagttgctcgaagaagatccgctgtgccaaaccacttcccacccggaagggatgcagcacgttgatttcacaatagtaatgcgccagccgctcgacgaacttcgctttctccaggccaaccagataaccttcttcctccagatcctgcatcagggcattgccctctttttcgatataagcaaagtggcagaacggcgtatcgccctgataaatatcgacttcgcgcagttgccccgcccagtcgaaaatatcctgatacagctggcgatggatagtgcgcaaatgcggtaaaccccgaaccaacgggccaagttcaatggtcgcagcacgcagcgccgtcatttcgtaagcggcctgttccagccgctgctgctggcggatgttcagccggttacgcatgatatcaaggcctggataaagatacggatcgcgcccttcgccgaatttatcgctcatagtgcctcctcagcgcttcaagacgcgctaaagcctctgcggcagtaagagtgactaaaggcatctcgacgccttcaagacggcgactggcctggaaattacgattacgctgaagctcccagagacgggacttttgcttatcggtgagtttcttcacttgatgcctccctgaacgtgtccatttgccacaagtataagcggcaaatccgggttacgccgggagagcagaagcgcgggcaagattgcccgcgcgagaaatcattacggcaggactttagcggaaaggataactaccggttttgacggcacattctggtacggaccaacgtcatgagtcggcacctgggaaatcttatcggcaacgtccatgcctttcaccactttaccaaataccgcgtaaccgaaatcacgctgaccgtggtcaaggaaggcgttatcggcaacgttgataaagaactggctggtggcgctgtctttgtcagcggtacgcgccatcgcgatggtgccacgcgtgttgcgcaggccgttatcagcttcatttttgattggcgggtttggttttttctgctgcatctgctcggtgaaaccgccgccctgaatcataaagccaggaatgacgcggtgaaaggtcgtgttgttataaaaaccactgttcacataatcgacaaagttttgcacagacactggcgctttttgtttatccagctccagttcgatgttaccagctgaggttgtcaacaatacgtgcgggtcccctttcgctgccattgctgcgggagaaagagcagaaagggcgaaaacagcagccatcgccgccagggtcgatttgaacatgagatttccttaacaaacagagcagaaaaaaagcaagtgaagagattctaaatagccttcaagaacaaggccatccctttacctaattttacgtatctgaaatatatgtaacctgaggataactttttattccgtgaccaaaatcacctcttaaaatgcaatttagcaaccgattgcaataaaacatttaatcagatcacaaaatcgcctaaaatcgcccgctcgcggcatagcccgctatgccattttatttttgaacgcaggccaatcatgactaacagcaatcgcatcaagctcacatggattagctttctttcctacgcactgaccggtgcgttggttattgtcaccgggatggtgatgggaaatatcgccgattatttcaatctgcctgtttccagcatgagtaacaccttcaccttcctcaatgccggcattttaatctctatcttcctcaacgcctggctgatggaaatcgtcccgttgaaaacgcagttacgttttggctttctcctgatggtgctggcggttgccggtttgatgttcagccacagcctggcgctgttctcggcggcgatgttcattctcggggtggtcagcggcatcaccatgtcgattggtacattcctggtaacacaaatgtatgaaggacgtcagcgcggttcacgcctgttatttaccgactccttcttcagtatggccgggatgattttcccaatgatcgccgcgtttctgctggcacgtagcattgagtggtactgggtttatgcctgcatcgggctggtatatgtcgctatttttattctgaccttcggctgtgagttcccggcgctgggcaaacatgcgccaaaaacggatgctccggtagagaaagaaaagtgggggatcggcgtactgtttctctctgttgcggcgctgtgctacatcctcggtcagttaggttttatctcctgggtgccagaatatgccaaaggtctgggtatgagcctgaatgacgctggcacgctggtaagtaacttctggatgtcgtacatggtcggcatgtgggcgttcagctttattcttcgcttctttgatttgcagcgcattctgaccgtactggctggtctggctgcgattctgatgtacgtctttaacaccggaacaccggcacatatggcgtggtcaattctcgccctgggcttcttctccagcgcgatctataccaccatcatcaccctgggttcacagcagaccaaagtaccgtcgccaaaactggttaactttgtcctgacctgcgggaccatcggtactatgttgacctttgtggttaccggcccgattgttgaacatagtggtccgcaggcggcgctgctgacggcaaacggtctgtacgctgtcgtctttgtgatgtgcttcctgttaggtttcgtcagccgtcaccgtcagcataacaccctgacctctcattaattgttcatgccgggcggcactatcgtcgtccggccttttcctctcttactctgctacgtacatctatttctataaatccgttcaatttgtctgttttttgcacaaacatgaaatatcagacaattccgtgacttaagaaaatttatacaaatcagcaatataccccttaaggagtatataaaggtgaatttgatttacatcaataagcggggttgctgaatcgttaaggtaggcggtaatagaaaagaaatcgaggcaaaaatgagcaaagtcagactcgcaattatcggtaacggtatggtcggccatcgctttatcgaagatcttcttgataaatctgatgcggccaactttgatattaccgttttctgtgaagaaccgcgcatcgcttatgaccgcgtacacctctcgtcttacttctctcaccacaccgccgaagagctgtcgctggtgcgcgaaggcttctacgagaaacacggcatcaaagttctggtcggcgaacgcgctatcaccatcaaccgtcaggagaaggtgattcactccagcgccggacgtaccgttttttatgacaagctgatcatggcgaccggttcctacccgtggatcccgccaattaaaggttctgatactcaggactgctttgtctatcgcaccattgaagacctcaacgccattgaatcctgcgctcgtcgcagcaagcgcggtgccgttgttggtggcggcctgttaggtctggaagctgctggcgcgctgaaaaacttaggcattgaaacccacgttatcgaatttgcccctatgctgatggcggaacagcttgatcagatgggcggcgagcagctgcgtcgcaaaatcgaaagtatgggcgtgcgcgttcacaccagcaaaaacactcttgagattgtgcaggaaggtgttgaagcgcgtaaaaccatgcgttttgccgacggcagcgaactggaagtcgactttatcgtcttctctaccggtatccgtccgcgcgataagctggcaacccagtgtggtctggacgttgctccgcgtgggggtatcgtcataaatgattcctgccagacttccgatccggatatctacgccatcggtgaatgcgcaagctggaacaaccgtgtatttggtctggtagcaccaggctacaaaatggcgcaggtcgccgttgaccatattcttggtagcgaaaacgcctttgaaggtgcagaccttagcgccaagctgaaactgctgggcgtagacgtaggcggtattggtgatgcgcacggtcgcacgcctggcgcacgtagctacgtttacctcgacgaaagcaaagagatctacaaacgcctgattgtcagcgaagacaacaaaaccctgctcggtgcggtactggtgggcgataccagcgactacggcaacctgctgcaactggtgctgaacgctatcgagctgccggaaaacccggattccctgatcctgccagcgcactcgggtagcggtaagccgtctatcggtgttgataaactgccggacagcgcgcaaatctgctcctgcttcgacgtcaccaaaggcgacctgattgctgctatcaacaaaggctgccacaccgttgcggcgctgaaagccgaaaccaaagccggtacgggctgcggcggttgtattccgctggtcactcaggtactgaacgcggaactggcgaaacagggtatcgaagttaacaacaacctgtgtgaacactttgcttattcgcgtcaggaactgttccatttgatccgcgttgaaggcattaaaaccttcgaagaactgctggcgaaacacggcaaaggttacggttgtgaagtttgtaaaccgaccgtcggttcgctgttggcctcctgctggaacgaatacattctgaagccggaacatactccgctgcaggattctaacgacaacttcctcgcgaacatccagaaagacggcacctactcggtgatcccgcgttctccgggcggtgaaatcaccccggaagggctgatggcagtgggtcgtatcgcgcgtgaatttaatctctacaccaaaatcaccggctctcagcgcctggcgatgtttggcgcacagaaagacgatctgccagagatctggcgtcaactgattgaagccggcttcgaaaccggtcatgcctatgcgaaagcactgcgtatggcgaaaacctgcgtgggaagcacctggtgccgctacggtgttggcgacagcgtcggcctcggcgtggaactggaaaaccgttacaaaggcatccgtacgccgcacaaaatgaagttcggtgtctccggctgtacccgtgaatgttcagaagctcagggtaaagacgtgggtattatcgccaccgaaaaaggctggaacctgtacgtttgcggtaacggcggcatgaaaccgcgtcatgcggatctgctggcagcggatatcgatcgcgaaacgctgatcaaatatctcgaccgcttcatgatgttctacatccgtactgccgacaaactgacgcgtaccgcgccgtggttagaaaacctcgaaggtggcatcgattacctgaaagcggtgatcattgacgacaaactggggctgaacgctcatctggaagaagagatggcgcgcctgcgggaagcggtagtgtgcgaatggactgaaacggtcaatacgccgtctgcgcagactcgcttcaaacacttcatcaacagcgacaagcgtgacccgaacgtgcagatggtgccagagcgcgaacagcaccgtccggcaacgccgtatgaacgtatcccggtaactctggtggaggacaacgcatgagccagtggaaagacatctgcaaaatcgatgacatcctgcctgaaaccggcgtctgcgcgctgttaggtgacgaacaagtagcaattttccgcccgtatcacagcgatcaggtgtttgcgatcagcaacatcgacccgttcttcgagtccagcgtgctgtcacgcgggttgattgcggaacaccagggcgagctgtgggtcgccagtccgctgaaaaagcagcgttttcgcttaagcgacggcttgtgcatggaagacgaacagttttccgtcaagcattacgacgcgcgagtgaaagacggcgtggtacagctgcgcggttaatattttaacgggaggcgcaatgcctcccctttttgcatggtcctgtaataaccttcggtatattgcaggacattttttaaactttttgttttattttttgtttttattttttaaaggataatcaaatgtttacagacactattactaagtgtgcggctaacgctgcgcgcattgcacgcctgtcggcaaataacccgctcggcttttgggtcagctccgcgatggcgggcgcgtatgtgggtcttgggatcatcctgattttcacgctcggtaatttgctcgacccgtccgtacgtcctctggtgatgggcgcgacctttggtatcgccttaacgctggtgattatcgccggttctgaattgttcaccggacacaccatgttcctcacctttggggtgaaagcgggcaccatcagccacgggcaaatgtgggcaatcctgccgcaaacctggctgggtaacctggtcggttccgtcttcgttgccatgctttatagctggggcggcggtagcctgctgccggtagataccagcatcgttcactccgttgcgctggctaaaaccactgcaccggcaatggtactgttcttcaaaggtgcattgtgtaactggctggtttgcctggcaatctggatggcgctgcgcactgaaggggcggcgaaatttatcgctatctggtggtgtttgctggcatttatcgcgtccggctacgagcactccatcgctaacatgacgctgttcgcactctcctggttcggcaaccacagcgaagcctacacgctggcgggcattggtcataacctgctgtgggtgacgctgggtaatactttatcgggtgccgtattcatgggattgggttattggtatgctacgccgaaagcgaatcgtccggttgcggacaaatttaatcaaactgaaacggctgccggttaattactaaggggtttttacgtggatcatttgcctatattttgccaattacgcgatcgcgactgtctgattgtcggcggtggtgatgtcgcggaacgcaaagcaaggttgctgttagacgcaggcgctcgcttaacggtgaatgcattagcgtttattccacagttcaccgcatgggcagatgcaggcatgttaaccctcgtcgaagggccatttgatgaaagccttctcgacacctgctggctggcgattgcagcgacagatgatgacgcgcttaaccagcgcgtcagcgaagccgctgaagctcgtcgcatcttctgtaacgtggtcgatgcgccgaaagccgccagctttattatgccgtcgattattgaccgctcgccgctcatggtagcggtctcctctggcggcacctctccggttctggcgcgcctgttgcgcgaaaaactcgaatcactgctgccgttacatctgggccaggtagcgaaatacgccgggcaattacgcgggcgagtgaaacaacagttcgccacgatgggtgagcgtcgccgtttctgggagaaattattcgttaacgaccgcctggcgcagtcgctggccaacaacgatcagaaagccattactgaaaccaccgaacagttaatcaacgaaccgctcgaccatcgcggtgaagtggtgctggttggtgcaggtccgggcgatgccggactgctgacactgaaaggtctgcaacaaattcagcaggcagatgtggtggtctacgaccgtctggtttctgacgatattatgaatctggtacgccgcgatgctgatcgcgttttcgtcggcaaacgcgcgggataccactgcgtaccgcaggaagagattaaccagatcctgctgcgggaagcgcaaaaaggtaaacgcgtggtgcgtctgaaaggcggcgatccgtttattttcgggcgtggcggagaagagctggaaacactgtgcaacgcgggtattccattctcggtggttccgggtattaccgcagcttctggttgctctgcctattcgggtattccgctcacgcatcgcgattatgcccagagcgtacgcttaattactggacacttaaaaaccggtggcgagctggactgggaaaacctggcggcagaaaaacagacgctggtgttttatatggggctgaatcaggctgcaactattcagcaaaagctgattgaatacggtatgcctggtgaaatgccggtggcaattgtcgaaaacggaacggcagtcacgcagcgcgtgattgacggtacgctcacgcagctgggcgaactggcgcagcaaatgaacagtccatcgctaattattattggtcgggttgttggcctgcgcgataaattgaactggttctctaaccattaatttaaccagggccagagaagtctggcctttttcgtttacaactctctttatatattcagcagataaaaacataaccccttaataaatattgtctgctaatgggttattttcaccgttacagcgacttacaaaattaaatcaatcgctcactgacgctaattgaatatttctgtatcgttcttaatgagcagtctgcttatattcatataatcaatgaatgttaattaatatataatacatagggaatgtaaatgaacaaatttattaaagttgcactggtaggcgcagtactggctacgttaactgcatgtactggtcatattgaaaaccgtgataagaactgctcttacgactacctgctgcacccggctatttctatttctaaaatcattggcggttgcggtccgactgcacagtaagccattgacagaaatcggctaacgccggtttaattgcctgacgccctcgagattacccgagggcgtatttgtttctgcattcttttcaaaaatatcgtttacaacgattaaatgctggcaatactttcacgcaagatccgcaatatcgtctcttcaccgctgcgatttgggttaatgcgaatcgcgcaatgttctaactgcggattcgcctggcgaaacgttccggaaagtcgataaaagagcggcgggatttcatatttcgactctgcaccaaccgggtaaggcaaggcaccgagtttctgcgcctcttccagcactctggcggcaatcggctgatgaaactccacaatcaataccttcgactgtgcattggcaatgacggcgcttttcacttccgccaccgcgccgccgttaagcaaagccagcaaccgttcagatacccccgcctgcaccgcgtgcatcactggcgcgagcaccagaccacgcaacacctctaatgcctgcgccccctgaatctgactgccgccggaatagagcgtggcgcgaatccggctaataacatcggcatcgcctaccaccgcaccaacgccctctggcccaaacagcttgaagcaggaaaatgtcgacacattcgccccgcattcgcagccgattcgcgctaccttcatcaccgcatagttgtcatcggttaacgctggaacacctgccgcgcgcaacgttgccagcacgtctgccagcacatagcggtcctgcggctgctggcgcgtatgctgcaccagcgcggcatcaggttgttgctcgtcaacaacctgcttcagtgccgacagatcattgaaatcagccgtaatgagcgttagccccatctgctcaataataacccgtgtcgtcgggtaaacaggcgcgtcatgcaccagaagacgctgccccgatttgagcaaagccgccagtgccgcacggatcgcgccagtacccgcgccctgtaccagcgccgcggcctgtgcgtgaaacgcgtcagccagcacctgttccacacgctgggtaatgcggggctgatttagccccggcgttaagcccaaatcaccgcaggtaagaaactcgcagccaggaaaatgacggcaaatcgtgtccaccagcgcaaactgcttttgctgcgcctcaataagcgtcaggctttgcagaggaaacgtcttcataggtgccttccttaagccggaacgaacaggccaagccagtaaagaacattcagcaggatgccggtgatcattactgctacgaccggtgccgccattttctgtaccggacggcccagggattcgttgaggaagtaaatggcaaccgcgatagagaatccggtatagcccgccattttgattgctgcaaagatcgaaccgaccagcaacgccacttccatcagcatattcatggcgttacggatgttatccgacgcattacgtaccgacgggtagcgccccaaccatttgccgatcgaacgaagcagcaagacttccgccgaaataaccactgcgcctaataccgctgcaaccatcggattcggcgagagatagcccaccgcataaacaaaggtaaagcccgcaactgcatacacaccggtggctaacgcggtggtggcaatcaacggcacaaaacccagcccgcgcataaattctgccagtgccgcctggttgattagtgtttgcgattgttccggcgttacgcctgcggagtacgctttctccagtgtgaagatcgacacttcactaccggcgaaaatcttcatgctggcaacggcagcaatcaatgcacccacgatggcgatatacggtaagtttttgataatccgtgatgtacgctcttcaaacaccgacataccgctggcatcgatatcattttcatcacgatggcgcaggtcatgagttattgcgatccccagcagcatcaccatgccaataaagatttcgatggattcagggttaagatgtgggaaatagcgcactaccaccacacgagtcatcagtaccaccacggcggcgatcagactttgcttccagccaaactggtagaaaatcgccaccaacgggaacagtgcaaaagctgaaaccaccggcgagcttaattcccccaggctacctaatacatccaccggtagcgcggtcagcagctggtttactggcaacagacaggtgaggatcaatattccccagatagcaccaagaccaaacgccatcaggctgtttatcgccagtacgccgaggatatcggtaggaagaaagagtaaccatgcgttgagcagcccggttttcagggtaaaagagatccccaccgaggccacaaaaccaatgctcagaccaaaagcgatactccccgcctcgcgacggttcatatagccttcaatcagttgtggcaggatcgggcggataccgtcatgaaaaacggccgccgagcgatgcgccagaagcgatgtcatacccgtcaggcacgccaccacgataatctgaatatacagatccatagtcgtgccttttatttcagatggttaatcagcatcggaatcgcgtgttcaacgtgctcaacggaaaggccaaacgccacttttccttcagcgatcattttggcgatatgttcgtctttcgctttaatgcccggcttggcaatggtgcaacttttgttatagccaatcaccgcgatagcaatcgacaaggccgcgcccgcaccggtattacacgcgccgatgtagtaatccagttgcccggatttcactttcattgccgcttccatgtcgttgtgaatgaaaacttcaaaacagccaggagccgtcgcttcaatggtttttttaatctgctcacgctgtaagcctgcaacgccaatctttttcatgagtctgtccttattggaaaaattgagagggattttcacgtaacatcacatccacatcggcctgactgaatcctgactggcgcaattgcggaataaaagtggtcaataaaaagtcatagccataaccaccgttggcttttaaatgagagcgccgcgtaatatccatcgacagcatgacgcggttcagcaacccacggtcacgtagcgcatggagcatcgcaatgcgcttttcgtccgggtagtaactgttcttgccgatggtgtcgaactgcacatacgcgccgagatcgatcatcttcaaaatgttgtcgagattgtctttcagatcgcagtggccgacggtgacgcgcgaaagatcaactccgtgggcttgcaacagagccagttgctccagccccatcgtgctgaacgacgtatgcgtggagatcgggcgtccggtctggttatgtgccagcgcggcggcaataaacaccttctcttccagcgacgtaatcttcccttcgctggagccgatctccgcgataattccggctttcaggtcagtgccatcgataccctgctcaatttcatcgaccatctcctgcgccagttcctgcacgctgcgggtcgccacatgttccgggaaaaacgcgtcctggtaataaccggtacaggccaccacgttgatcccggtttcgcgcattacatcgagcataaattgcgcattgcgccccatgtaacggttggtcatctcaatcacattacgcacgccccgggccatcaggtcgttcatctcctggcaaatgaacgcatactgatcaaggcggcagtccacgttgtttttaaagccggagagatcaatatgcagatgctcatgggccagggtgtaacccgtcggatcaaaactcatagggtgtctcctgcaaaccggagggaggaaagaaaagagcgaccattttgtggcggtggcgcgcggaaaaattcacatacggtagcccccacatcagaaagcgtggtgcgcacaccaagctgcgtagcgaccatcccttgctgataaaccagcactggcaccacttcgcgggtatggtggctgtgaccaatggtcggatcgttaccgtgatccgccatcacgaccaggcaatcatctggctgcatcgcctcaataagccgggcaaggttacggtcaacgacctgcaaacgttccgcataacgtgcgacgtcttctgcatgaccagcgaggtcggtttcctggatattggtacaaataaacgccgtcggataggtgttaaattcgttgagggtgatatccataatccgctggctatccaccaggttttgccagctcacgccataaggattgctgacgatatctgccaccttacccaccagcacggttggcacgcccgcttcatacagtttttgcggcacctgcactttttcatcaacaccgtagcccatatgtacgacctggaaaccgttgtcataggcgccagaacgcggcgcattgatgccaataaagcgcccttctttgctttctgcggcatcgaggatgcactggctgtcggttaacaggccaccaaatgtaatgacccgcccgacctgtacctgctcacgcacgatacgacccattttgattgcgtcgtcaaaagagatcacagagagattggcggtgatgttatagacctggcctaaatccgcctcgagattatcgccaatcgcaaccgcctgattgacccacagaaattgcagatcatcgccacgacgctcaacctgccagccagcggaaactaatgcctgctcaacacggtcaatcacatcacgaaagggcatccgcagcggcggtaatgggcgcgtacctaaaatctcctgatgccccataaaggtatcgccaccttcatgttgcagctctgccacgccccaggttgcggagtctgacggctgcatatcgccaggcgcataacccaatgcgttgattagccccagagtctccagcgttggtagctgcaaatgcggcaactggctcaggatgtgaccacaggtattcgccccggcatcctgcggacgcaccaacgtgacatctttcattgcccctacgccaaagctatcaatcaataacaccacaaatcgcgccatttacgcctccagagggttgcctaggctgtcataacgaccaactatttctggttcgccatggtgaataccggacaccaacaccacatcgctacgggtgataaaaatctgcgtgcgaaaacagagcaccactgcactgcttaccggatgctcgcctgccagcggcagggtgtagtcgatactgctgtcatccacggcgttgagatatgtttcagtaattctttgattttctggcgtaaacaccagcgcatgttgcgcgtgaccacgacggtagtaaccgccgccgtagcagtagctgtcgccacggaaatgatgggagatttcacttaaccagagcatcgcgatacgttcaggctgatcgccctgttgatttgccggaatagtgcccgtcagcgcatgaccgggttcggtatgagtcacaccgtattccgccagcaatggcagcgacgtgcagctggtcgctgaaggtgcgttcagttgctcaatcgcaataccagatttcgccagttgatcccgtgcttgtaccagcgtgtgaagattcggtgtcggcaaaactttcccggcagcctcatcccaaagcaggcaagggaaatgggtaagtcccgccaaatgtagccccggcagattctggatttcagcaaccacctcgtgcagcgaatgctgtacaaaaccgctctcctgccccggataaagaaaatcatcgtcgctataaactttgagcagcacagactgcacacgtccggtcttcaccgctgccgcagaaatttcccgcgctttgtcgagggtaaacacagtgatgacgtcggttccctgttcaacggcgtcagaaacctgatgacaagggatttgtaccagatgcccctgatgcgctaccggcaaaccggcgcggcgcatgactcgcgcctctttgtaatccaccgccacaatgccgctgtagcccagagccagcagtttttctgccagccacggattacgaccgaattgtttggtcatcagatacagttcaatgccgtaaagccgcgccgtctcaatcagccgcttgccgttttccagaacttgatccacgtcgatcacccaactgtccggggcgatcttgccctgctgccacaaacttagtgcggcggaaatcagcgccggattctggcgtttcaatgcttctacaaacatcttgttgcctcgtttctgttccttgaattaaatattcatttttttgaatatttaggttgtacgacgtggatttatcgggagcttcaaacctcttcgttagcagccatccataatccataaaggttggccagcaaatagccttcttcacacgggttaacttccagtgcaaattccttcaacaatacctgatgcaattgcacaacggcttgccagtggctggattgcgccagttccgccagcaattcgtcatccagcggctctatttcttcaccacggcgactgcgcatcagtgcactcgccatatgtgtcatcgccatcgttccttgctcactgcgcgccggtagatggcactctgtttccagtacattgacgacctgcatcatgcctttgcagatgtccttatcaataacgcctgcatcgcaaagcaggttgagtctggtttccatatcagatgcctttcgtttaataactgggttcctgttccccactgactactcgctgttgatgagcaagcagggcatgtttatcaacaactgcacgcagcagttgttgcattgggtaatcatcgactcgcgtcaggatcacggcttcggtggcctgtaaaaatcgcggatcgtctgtgagcggcgtcgcttctaatcccagcatggtcagttcgttttccgccactacgttccagataaccgcgtcaacatcgcctttaacaatgcgttgtaaactctcgtgataagagagatcgactcgttccacatcactatcgccaaaaaagacatcggtcatgattttctgatctgccgaacggttatccagccccacgcgcttcacgtttgcggactcgcctttacggcaaatcaactggtgctcgccaacgtaggtatgcggtcccaactccagcgcgaggcataatcctttttgcgtgagataactttccgccgccagtcgcgaaaccaccgccatgtcatacacgccgttaagtaaacactccacgcgaatatccgcgccgcgcatatgcgcatagtaaaaaggaatgccatcaaactgggctttcaatccgctcgccaggccttcgtacaaacgggtatagggcaagggcatcgcacataccacgttgttgatatccacatgagtcagcaatgctttgttatccatctcgaccagataactgccattgcgcccacggcgttcaatccgtatcgctccgcttgattccagcgttttcaacgcggcctgcgtcaggccaaccgatgaacggcattcagttgccagctcatctatggttttcagtcgattaccgcacttttcacccaacaaataacgggccagtgtcgtgataacgacgccttcttttttgataaacgttcgacgcataatatattttcaataaaatgaatgtttatatcttcaggaatttgaagataaggcgcaacagcgagatgtggaaacggcgaggcgcttcacattttttcggattattgcaaatgaggataaaaaaaccgggtttccccggtttttggcattaatgttaaattacggcttcgccacaaaaccaatcgcttcgtacaccgcttttagcgtacgggaagcgtgtgcgctggctttttctgcgccgtctttcatcacctgttgcaggaaggcttcatcgttgcggaaacggtggtaacgttcctgcaattcagtcagcataccggaaacggcatcagccacttcacctttcagatgaccatacatcttgccttcgaactgtttttccagttccgggatgctctggcccgttaccgcagaaaggatatccagcaggttggaaacgcccgctttgttctgcacatcgtagcgaactaccggcggctcgtcggagtcagtgaccgcgcgtttgattttcttcactaccgatttcggatcttccagcaggccgataacgttattgcggttatcgtcagacttggacatcttcttggtcggctccagcagcgacattacgcgcgcgccagatttcggaataaacggctctggcaccttaaagatatcgccgtacagcgcgttgaaacgctgggcgatatcgcggctcagttccaggtgctgtttctggtcttcacccaccggcaccagattagtttgatacagcaggatgtccgctgccatcagcaccggatagtcaaacagaccagcgttgatgttctcggcataacgcgcagatttatctttaaactgtgtcatgcggctcagttcgccgaagtaggtatagcagttcaatgcccagcctaactgcgcatgttccggcacgtgggactgaacaaaaatggtgcttttctcaggatcgataccacaagccagatacaacgccagcgtatccagcgtcgctttacgcagcttctgtgcatcctggcgcacggtgatcgcgtgttggtcaacgatacagtaaatgcaatggtagtcatcctgcatgtttacccactgacgcagcgcacccatgtagttaccaatggtcaattcacctgagggctgtgcgccactaaaaacgatgggcttagtcatttttcgattcctgattttcgctatgcggaagccctaatgcgggcagaaggtcatttagagactgataaattacatcaggctggctgagatcgatagcctcgccgtagttatatccgtaggttaagccaactgatgggcaacctgccgcttttgccgcctgaatatcattgcgtgagtcgccgacaaacagcatctgttgtggagcaatgcccatccgctcagccaccagtagcagcgggtccgggtgcggttttttattttgcacatcatcaccaccaatcaccacgctgaagtatttggcgatatctaaggcttcgagcagcggcgcgacgaacggcgtcggtttgttggtgaccaggcctagcggcaggcctttagcctgcaacgcgcccaacgtatcggcaacgtgcgggaacaaaaacgtcccctcttcggcaacctcgccatagtagcgatcgaacagtttacgcaggatacgtacctgttcttctgccggaatgtcgtcatcaacgggcggtttacccattgttttacgcagagtcgcacgttcctgacgcgcccaggtcaatgcgcgctccatcagaatatctgcgccgttaccaatccaggtaataacgcgttcttcacctgcgacaggcaactccagcgcatacagcgccatatctaccgcagcagcaagaccgggtgcactgtcaaccagcgtaccgtcgagatcaaaagcgacgccgcgaatatcttcaaacttattcatgacttacctttgccagttcactgcgcatttcatcaatgacttttttgtagtctggctggtcgaagattgccgaaccagcaacaaacatatccgcgcccgccgcagcgatttcgccaatgttgttcaccttcacgccaccgtccacttccagtcgaatgtcaaagccagactcgtcgatacgacgacgtacttcgcgcagtttatccagtgtttgaggaatgaaagactgaccgccgaaaccaggattgacggacatcagcaggatcacatccagcttatccatcacgtaatccagataactcagaggtgtcgccgggttaaataccaaacccgctttacagccattttctttaatcagttgcagcgtgcggtcaacatgctcggaggcttctggatgaaaggtaatgatgctggcaccagcggcagcgaaatcaggcacaatgcgatcgacgggtttcaccatcagatgtacgtcgataggggcggtaatgccgtagttacgcaaggatttcagcaccattggcccaatcgtcagattgggaacatagtggttatccatgacgtcaaaatgcacgacatcagcgccagctgccagggcttttgcggtatcttcacccaggcgggcaaaatcagccgacagaattgagggggcaatcaaatactgtttcatccgcttctccttgagaattattttttcgcgggtgaaacgactcctggtttgtacaaagccagcagttcgtccacctttttacgtgtgccgccgttgctgcttatactgcgtcgaactttgacgacatgcaattttgcgcgctgataccactcacgcgttaacatcgtatcgtgattggagatcagcaccggaatatggcgatcaaccagaccttcagcgatctccgccagatgcgcttgttgttcaagcgtaaaactgtttgtgtgatacgccgtaaagttggcagtcgcagacagcggcgcataaggcggatcgcaatagacgacagatgcatcatctgcgcgcgccatgctatcggcgtaagactcacaatagaaaaaggcattctgcgctttttcagcgaagtgatacaactctgcttccgggaaatagggttttttgtagcggccaaacggcacgttaaactcaccgcgcagattgtaacgacacaggccgttgtaaccgtagcggttcaaatataaaaacagtaccgcccgacggaacggatcctggcttttgttgaactcttcgcggaactgatagtaaacctcagcgcaatttgtttcgggaacaaacagctcgcgtgcggcctgtacgtactcatcagtacgcatcttcacaatgttatagagactgatcaggtcgctattgatatcggcaaggatataacgagaaaagtcggtgttgagaaacaccgacccggcacctacaaaaggctcaaccagacattcgcccttgggcaaatgccgtttaatatcatcaagcaggggatacttgccccctgcccacttcaaaaaagcgcgatttttcttcatgctgactaactaattacaccttctccggctgtggagaaagctccgacagcatccagcgcttcaggcaacgcccgcaatgataaaccattgcgggagataaccttgattacttcaggtcggcctgtacctgacgcagcggtttcgcccacgggtttttggcctggacatctgctggcaatgtagataccgcttttttcgcctcttctttcgaagcatacacgccagaaaccaggacataccacggctgaccattacgcgtcgtttcatagacaacgtagtttttcagattctctttcttcgcccaaccgttcaggttgtcgtagttagaggaactgctcagctgcagagtgtaatggctggacggtgccgatttcaacgaaccaacattacctgcggtcttccctccagcggctggtgttgccgtggtttgcgccggggatgccgtctgtactggagccgtagtcgccgtctcttttggtgctggcgtagaagtcgcagccggtgcctttgtgctcgccacaggggcagctggttcagttcgcttcggcgtctgtgcgactggcttcggttccgttttcacggttgcttgcggttttttcggttcaatcaccgcctgctgacgagccgggcgcgtagtggccggacgttcagcggtttgcgttttcgccgtgtcacgcgatgcattgccattgcgaacaggcgcgacagtcgcgggttcagtcggcaatgtagaattgaccgccacattgttcaactgttgctgattttgtggctgggtcagcgcattgttcaggtcaccctgcacttcaacacgttgttgaccatccgttgccgccggggtttgcccttgagtcggcgtagaagagatcggcggcagagaaacatcctgctgagtattttccgcagacgtggttcccggcgctggctgcacgccattggcctgatcggtcgcattgcctgcaagatcaatactcttctcgccagacgcggtttgatcgctggaagaggtcgagggggcttttagcgcagaaccgataccgatgatcaacagcagtagaaccagaatgccgacacccatcatcatatactgacgagaagcgggtttactggctgcttttttgcgcttacgcggacgacgctctacgcgctcttcatccacggtttcatcttcggattcgtcaatttcttcttcgatttccggttcctcattacgcgctttttgcgcacgagtcggacggcgatcgtcagtgtcatcaagttcaatatcatcaaaattgatctgcggttcgccacgttcagtacgctcagaacgttcagaagattgacgagaacgaccagtacgacgatcgctgggatcgggtttcagctcgtcttctggtttgaattcatccatttaacaccccactaaaaggttaatgcttaccacgttgcaattaacctgaagctaatagaccgcttgataagcggcctgacctttcttgttgttacgctgattgacaatcggcaatggcgttaagaacaagctcgtgcgaaacgccgctgcaaacttcactcttaccaattgccaacggaagaattaagcgcatctctcccgcaaggactttcttgtcacgcagcatatgcggtaaatacgcctgcgcggacatttcgcgcggcccattgaccggtaacccagcccgcgtgagcagggttataatacgctgcgtttcggcagaactaaactgcccgagacgttccgacgtccgcgccgccatcaccatacccgcagcgaccgcttcaccatgtaaccaattgccataccccatttcagcttcaatggcatgaccaaaggtgtgtcccagattcagtaaagcacgtaacccggtttcgcgctcgtcggcggcgacaacttctgctttcagctcacaacaacggcgaatacagtacgccattgccggaccgtccagacgcaacaacgcatccagattctcttccagccagttaaaaaacgcaccgtcaagaataatgccgtatttgatgacttctgccagccccgacgctaactcacgcgggggaagcgttttcagacagtcgagatccaccaccactgaagcgggctggtagaacgcgccaatcatgtttttaccgaggggatggttgaccgcagttttgccgccaacggaggagtcgacctgcgacagtaacgtcgtcgggacttgaatgaaacgtacaccgcgctgataactcgccgccgcgaagccggtcagatcacccactacgccgccgccaagcgccaccagagtagtatcgcgaccatgcggcttttgtaacaatgccgtaaagacggtatcgagtacagccaggcttttatactgctcgccgtcagggaggataacgctatcgacgttaacacccgcctgttcaagtacgccgcggaccttatcgagatacagaggagccagggtttcgttggtgaccaacatgacctgctcgcccgatttcagcggtaagaatgaagctggttcattaaacaaaccagatgcgatggtaattgggtaactacgttccccgagagtaacgacaatcctctccataacgcgacatccaccttaattactgtacccgcagacgagtgtatataaagccagaattagttgctttccagcatgtgaataatctggtttgcaaccactttagcgctttgatcatcagtacgaatggtcacgtcggcaatctcttcatacagcggattgcgttcattggccaacgcttccagaacttcacgcggcggtgtttcaacgtgcagcaacgggcgttttttatcacgctgcgtgcgtgcaagttgcttttcgatggtcgtttcaagataaacgacaacgccacgagcggaaagacggttacgcgtttcacgggatttcacagagccgccgccagtagccagcacaataccctgtttctcggtcaactcattgatgaccttttcttcgcgatcgcggaagccttcttcgccttctaaatcgaaaacccagcccacatcagctccggttcgtttctcaatctcttgatcggaatcgtaaaattccatattgagttgttgagctaactggcgcccaatagtgctttttccggcacccataggcccaaccagaaagatattgcgtttctctgccattttttcggtactactaagactattcgttaatgataaacccgcttcgctcagagagcgccgcaggacatgaactgaaacctcataagatattgcgagagtcagactgaaaattatctcaatactccagcgggtttggcaactgaataaatcacccatccctctgcatatctggtcgctgcaagcgcgctgccttgctaccaccgctctggcgataaatcaccgggtaagattagcgtaaaaaagacagcaaaatgccgcctgaatgataaatcatcatcatggaacgcaggcagcgaagagcaccaactctcaaatcggtactccttgtatgctaaatacctgcgcgcgtcaaatagatgaaacacgttcagtgtaaaaacattaccgcttttacggctgtttactcactggaaaccagtcgtggcgtgataaacaccactaactcgcgtcgttcatcttcttttccgtcatgacgaaataattgcccgaaccagggaatgtcgccaagcaacggtacgctatcctgacccgatttatttttacgggtaaaaatgccgcccagcgccaacgtttctccgcttttgacctcgacctgcgtttcgatctcctgcttatcaatcgccagcacttcgccatctgcctgctgtagcacctgccccggaacgttctggctgatgtgtaatttcagccggatgcgacctttttgtaacaccgtgggcgtgacttccatccccaggacggcctctttaaattccaccgacgtcgcgccactttccccgctggaaacctgatatggaatttcgctcccctgtttaatgctggcaggctgaagatgtgaggccagcagacgcggactggcgataatatccagctgctgtttttgttcgagcgcggaaagctcaagatccagtaaacgtccgttgatgcgtccaatgttaaaaccgatatgcgttgtcgccgtcgctacggagaggtcgctgccaagcgtggtgacttgcccaacgccaccagcttgttgcgcatcggccagcgtccatttcacacctaactcacgcaaacttttttcattaatggtgacaatatgcgccgagagctcaacctgcccgaccggcagatccatttgcgatacccactgttcaagcgtgcttaacgccgttttgttatctcgcagcaaaaggcgattggtgcgtttatcgacggtcatactccctttggcactcagtagcttctcccccgctttcgccagctctccggcgtcggcgtattgcagagtaatattgcgattttccagcggcagatttgcctgcgcccgcgcctgctccgcctcctggcgggcgatattgtcattctgccaggcaacggaatgcaccgagagaatattgccttcctgccgcgttatcagtccggcgcttttcactacagtttgtagtgcctgcttccagggaacatctgttagatgtaacgacaccgtaccgctgacgtctggcgaaaccaccaggttcaacttctcctgttcagccagcgcctgcaacacctgagctaccggaacgtcatccaccatcagcgtcactttttgcggctttgccgcctgtacgccgggtatcagcatcaacagtagtgcggctatccattgcttcatttgtatctccttgccgttgccacaaccagtgtggcggttcgcagtttgttccggttcccagcgttagtgcgtctggcgtcagctgtaaaattgtccagccgttttccagcacatcgttttgctgcacccgtcgccatttcttttgcccgtcttttattacaccgatgatgcgctcgcctcgcgctaccatcccctgatagcgccactggctaagttcgctaatccggcatagatcttccggcggtttaaaagggtcacgcataccggttaaaaggcacaatgcaatacctgccaacaaccagcgtttaaccctcatgcggtgtctccagttgtagcgtgaacaaaaggtcatcaccttccacgcttaacgaaaaacggctcacgctgacgttgcgctctgccagccgtgtaaatgccgacggcactgcttcccacagcgttttcaacgccaactcgcctccctgcgcggatggatgccagaaaaccagttgtgcgccgggcaactgaaaatccagtggcgaaaagggcagcgttttttcttcgctgaagggagtggtgtcaaccaggcgatacagtgcagcccactgctggtggtgactcgcccgtagtcgaattaatgcgtcgcgctcttcatggtgtgtcaatgacagaaaaatgagcgtaactaacaccagcaaccagactgcccagcaaaactggcggaggcggagtgatgtggcgaaccaccagtcaaagaacatgttcatcgctaaccttccttgttaactgatactcaaattgccagcgtccctgcgcatcctgctgcgtggcccccctctgattgagatgaaaagaagcatcctggcggagtgacgtttccagcgcgtttaacgcggcaatgcttgttgtcagccccttgatctccagcgttccctgctgccagcttatcgttgtcagccaggaatgttcgggtaaaagcgccgccagtgcttccagcgcagattgccagtcgcgggtaaattgtcgctggcgctgcctttgcaaacgctgttcgcgtaactgctggcgttccagcaaacgtggtttcgttatctgtaagctgcgggcgagttgttgttccgcctgaagcaaaacggcgtttacgcgtgcttcggcattgcttgtcagacgcagtattagcgttatcccgacggccagcagcagaggcgcaacgaacatcagcaaccagaaacgaagaaaagcagtccggcgttgctgtcgccagggcaaaaaattaattggcgggttcatcagtacaccttcccaagcgccagccccagcgcgatggcaaagtctccacctggtggcggtagcggcggctgacgaacagaaaccgcctcccaggggtcaaatccgccttcgccacatagcgcgacgctttcgggatcaacagataacgctgccgccagctccttcgcgctagtcatccccaccgccagtttgcgcccccagctatagcgcgtcgcccacagccactgttcgttatcacgccaggccagacattgctgatgagaaggtaaaaaaggcaggaatcgctgtaatgcactggcatccggagtgatcgcgctaacatgaacacgcaacctttctgccagagtaagcagcgttgccagctctttgctttgcgcggcagtcacgttataggcgggactgagtgagtcttcgctgtaatcgaagcgcagggagtccggatccatatccagttcacgggccatcgtcccggacagccaggccatttgctcccgctcaccgagggacatcgacgggcgtggaaatgaccgctgtaatgtgcgactggcgggaaacgccaacataatgtgatgacgctgcggcagttcacgactccacggtaacaacgtgttagccagccgctgcacatcaacaatccgcccatctttgataatgtcgttctccagtggcaaccgccaccagcggtgcaataagcattcttttgcgctccgcacgatagcaaccgctaccgcttcttgctgttgtaaatgcaaaccaatttgccagttcttaaatgccattgtgatgatctccttatcacccgtcactctgacgggtatatcaatgcgtctggcttgcctttatactaccgcgcgtttgtttataaactgcccaaatgaaactaaatgggaaatttccagtgaagttcgtaaagtattttttgatccttgcagtctgttgcattctgctgggagcaggctcgatttatggcctataccgctacatcgagccacaactgccggatgtggcgacattaaaagatgttcgcctgcaaattccgatgcagatttacagcgccgatggcgagctgattgctcaatacggtgagaaacgtcgtattccggttacgttggatcaaatcccgccggagatggttaaagcctttatcgcgacggaagacagccgcttctacgagcatcacggcgttgacccggtggggatcttccgtgcggcaagcgtggcgctgttctccggtcacgcgtcacaaggggcgagtaccattacccagcagctggcgagaaacttcttcctcagtccagaacgcacactgatgcgcaagattaaggaagtcttcctcgcgattcgcattgaacagttgctgacgaaagacgagatcctcgagctttatctgaacaagatttacctcggttaccgcgcctatggtgtcggtgctgcggcacaagtctatttcggtaaaactgtcgaccaactgacgttgaacgaaatggcggtgatagccgggctgccgaaagcgccttccaccttcaacccgctctactcaatggatcgtgccgtcgcacggcgtaacgtcgtgctgtcgcggatgctggatgaagggtatatcacccaacaacagttcgatcagacacgcactgaggcgattaccgctaactatcacgcgccggagattgctttctctgcgccatacctgagtgaaatggtgcgccaggagatgtataaccgttatggcgaaagtgcctatgaagacggttatcgcatttacaccaccatcacccgcaaagtgcagcaggccgcacagcaggcggtacgtaataacgtgctggactacgacatgcgccacggctatcgcggcccggcaaatgtgctgtggaaagtgggcgaatcggcgtgggacaacaacaaaattaccgatacgctgaaggcgctgccgacctatggtccgctgctgcctgccgcagtcaccagcgccaatcctcaggaagcaacagcgatgctggcagacgggtcgaccgtcgtattgagtatggaaggtgttcgctgggcgcgcccttaccgttcggatactcagcagggaccgacgccgcgtaaagtgaccgatgttctgcaaacgggtcagcaaatctgggttcgtcaagttggcgatgcatggtggctggcacaagtgccggaagtgaactcggcgctggtgtcgatcaatccgcaaaacggtgccgttatggcgctggtcggtggctttgatttcaatcagagcaagtttaaccgcgccacccaggcactgcgtcaggtgggttccaacatcaaaccgttcctctacaccgcggcgatggataaaggtctgacgctggcaagtatgttgaacgatgtgccaatttcccgctgggatgcaggtgccggttctgactggcaaccgaagaactcaccaccgcaatatgccggtccaattcgcttacgtcaggggctgggtcagtcgaaaaacgtggtgatggtacgcgcaatgcgggcgatgggcgtcgactacgctgcagaatatctgcaacgcttcggcttcccggcacaaaacattgtccacaccgaatcgctggcgctgggttcagcgtccttcaccccaatgcaggtggcgcgcggctacgcggtcatggcgaacggcggcttcctggtggacccgtggtttatcagcaaaattgaaaacgatcagggcggcgtgattttcgaagcgaaaccgaaagtagcctgcccggaatgcgatattccggtgatttacggtgatacgcagaaatcgaacgtgctggaaaataacgatgttgaagatgtcgctatctcccgcgagcagcagaatgtttctgtaccaatgccgcagctggagcaggcaaatcaggcgttagtggcgaagactggcgcgcaggagtacgcaccgcacgtcatcaacacaccgctggcattcctgattaagagtgccttgaacaccaatatttttggtgaaccaggctggcagggtactggctggcgagcaggtcgtgatttacaacggcatgatataggcggaaaaacgggtaccactaacagttcgaaagatgcgtggttctcgggttacggtccgggcgttgtgacctcggtctggattggctttgatgatcaccgtcgtaatctcggtcatacaacggcttccggagcgattaaagatcagatctcaggttacgaaggcggtgccaagagtgcccagcctgcatgggacgcttatatgaaagccgttcttgaaggtgtgccggaacagccgctgacgccgccaccgggtattgtgacggtgaatatcgatcgcagcaccgggcaattagctaatggtggcaacagccgcgaagagtatttcatcgaaggtacgcagccgacacaacaggcggtgcacgaggtgggaacgaccattatcgataatggcgaggcacaggaattgttctgattaaaaaggcgcttcggcgcctttttcagtttgctgacaaagtgcacttgtttatgccagatgcgggtgaacgcgttatccggccaacaaaaaattgaaaattcaataaattgcaggaacttcgtaagcctgataagcgttgtgcatcaggcaaacttcacgcatttacactcgcccctgccctttcaaccattcgcgcacgaggaacagcgcgctgacattacgcgcttcgttgaagtcaggggcttccagcaaatccatcatatgcgccagcggccagcgcacctgtggtagcggctctggctcatcgccttccagtgattccgggtagagatcttgcgctaccacgatattcattttgctggaaaagtaagacggtgccatgctgagcttcttcaaaaaagtcagatcgttcgcaccaaatccaacctcttcttttagctcgcggttagcggcttcaaagacgctttcacccggatcaattaatcctttcgaaaaacctaattcgtaggattcagttcccactgcgtattcgcggatcaggatcaggtgatcgtccacaatcggcacaatcatcactgcttcccggttggttggacgcattcgttcataaacacgccgcacgccattgctgaactccagatccacgctttcgacggtaaacagtcgggaacgggctacagtttcaacattcagaatggtgggtttttgtaatgatttgctcatcgtgggatctatgctgtgaaatcagcggttattgtgcgatatcggacacgctttcggcaatgtgaattgcatgttatttacatttatgtaacttaataaataatcgtcctcaaatcaaattaaaagtcaataggttgaaataactccaggaatttgctgatattccgccttcagagggtttgctatgatcagcggttactgtgatgtgcttaatgatgctcaagttaaactccacgcttgccgatagccaaccgcagaatcatgtattgtgtccggtgcgactgaccacgcctgacagactaagtaagatggggaaagcatgagcaccattgtgatttttttagctgctttgctggcctgctcactacttgcgggatggctgataaaagtgcgatccagacggcgtcagctgccctggaccaacgccttcgtggatgcgcaaacgcgtaaactcacatctgaagaacgtagcgccgttgaaaattatcttgagagcctgacgcaggtattacaggtgcctggcccaacgggagccagcgcggcaccgatctctctggcgctgaatgccgaaagcaacaacgtcatgatgctgacacacgctatcacgcgttatggcatctctaccgacgatccgaataaatggcgttactacctcgattcggtagaagtccacctgccgcctttctgggaacagtacatcaacgatgagaataccgttgaactgattcataccgattcgctgccgctggttatttcactcaacggtcatacgctgcaggagtacatgcaggaaattcgcggctatgctttgcaacctgttccgtcaacgcaggcgtcgattcgcggggaagagagcgagcaaatagagctgctcaatattcgcaaagaaacgcacgaagagtatgcgctgagtcgtccgcgcgggctgcgcgaagcgttgctgattgtcgcctccttcatgatgttctttttctgcctgattaccccggatgtctttgttccgtggctggcaggcggcgcgttactgctgctgggagcaggtctgtgggggctattcgcgcccccggcaaaatcctccctgcgggaaattcattgtctgcgcggtacaccccgtcgttggggattgtttggcgaaaacgatcaggaacagatcaacaatatttcactcggtattatcgacctggtctatcccgcacactggcagccatacattgctcaggatcttggtcaacaaaccgatatcgatatctatctcgaccgccacgtagtgcgtcaggggcgatatctttcgctgcatgatgaagtaaaaaactttccgttacagcactggctgcgcagtacgattattgctgcgggctcgctattggtgctgtttatgctgttattctggatcccgctggatatgccgctgaaattcaccctctcgtggatgaaaggcgcgcagaccattgaagccactagcgtaaaacaactggctgacgctggcgtgcgggttggcgatacattgcgtattagcggtacgggaatgtgtaatattcgcacttccggtacctggagcgcgaaaaccaattcaccttttttaccatttgactgctcgcagatcatctggaacgacgcccgctcattgccattaccagaatctgaactggtcaacaaagcgacggcattgaccgaagcagttaatcgccagctgcaccctaaaccggaagatgaatctcgcgtcagtgcctcattacgttcagcaattcaaaaatccggtatggtattgcttgatgattttggcgacattgttctgaagacagcagatctgtgttctgccaaagatgactgtgtgcgactgaaaaatgcgctggtcaatctcggcaacagtaaagactgggacgcgctggtaaaacgcgccaacgccgggaaactcgatggcgtgaatgtgttattacgcccggtgagtgcggaatcgctggataacctggtggccacctctaccgcgccgtttatcacgcatgaaacggcgcgagcggcacaatcactaaacagtccggcccccggcggattcctgattgtcagcgacgaaggcagcgattttgttgatcagccctggccttcggcatcactttacgactatccgccgcaagaacagtggaacgctttccagaaactggcacaaatgctgatgcatacgccgtttaacgccgaaggtatcgtcacaaaaatcttcactgacgccaatggtacgcagcatattggccttcatccgatcccggatcgttccggcctgtggcgctatctcagcaccacgctgctgctactgacgatgctgggtagcgccatttataatggcgtacaggcctggcgtcgttaccagcgccatcgtactcgcatgatgaagattcaggcctattatgaaagctgcctgaacccgcagctgatcaccccttcagaaagccttatcgaataacacgtttgcgcggcaggttatgctaccctgtcgcgcaaattgcttcactctggagatttccctcatgcatatcaacattgcctggcaggacgtagataccgttctgctggatatggacggcacgttgctcgacctcgccttcgataactatttctggcaaaagctggtgcctgaaacatggggcgcgaaaaacggagttacgccacaggaagcgatggaatatatgcgccagcaatatcacgacgtacagcatacgctaaactggtactgtcttgattactggagtgagcaactgggtctggatatctgtgcgatgaccaccgagatgggaccgcgtgccgtactgcgtgaagataccattccgtttcttgaggcactgaaagccagcggtaaacagcgaattttgctcaccaatgcgcatccgcacaacctggcggtaaaacttgagcataccggtctggacgcacaccttgatttattactttccacccacacatttggttatccgaaagaggatcagcggttatggcatgcggtggccgaagctacggatcttaaagctgaaagaacgctgtttattgatgacagcgaagcgattctcgatgctgccgcgcaatttggtattcgttactgcctcggtgtgactaatcctgactccgggattgccgagaaacagtatcaacgccatccgtcactgaatgactaccgccgcctgatcccctcgctaatgtgaaggagatgccatgaaagaaaaacctgctgttgaggttcgactggataaatggctatgggctgcccgtttttataaaacccgcgcgctggcccgtgaaatgattgaaggcggtaaggtgcattacaacgggcagcgcagcaagccaagcaaaatcgtcgagctgaatgccacgctcactctgcgccagggaaatgacgaacgcacggtgattgtaaaggcgattactgaacagcgtcgccccgccagcgaggcagccttgctgtatgaagagactgcggaaagtgtagagaaacgcgaaaaaatggcgctggcacgtaaacttaatgccttaaccatgccgcatccggaccgacgcccggacaaaaaagagcgccgcgacctgttacgatttaaacacggcgacagtgaataactgtcacctgcaagagagatgattatgccgcaacatgaccaattacatcgctatctgtttgaaaactttgccgttcgcggcgaactggtaaccgtttcggaaaccctgcaacagatccttgagaatcacgattatccgcagcccgttaagaacgtgctggcagaactgctggttgcgaccagcctgttaaccgctacgttgaagtttgatggtgatatcaccgtacagctgcaaggcgacggtccgatgaatctggcggttattaacggtaacaacaaccagcagatgcgcggtgtggcgcgcgtgcagggcgaaattccagaaaatgccgacctgaaaacgctggtcggcaatggttacgtggtgatcaccatcaccccgagcgaaggcgaacgctatcagggcgtggttggtctggaaggtgataccctggctgcctgcctggaagattactttatgcgttctgaacagctgccgacgcgcctgtttattcgcaccggcgacgtagacggcaaaccggctgcaggcggaatgttgttgcaggtaatgcctgcgcaaaatgcccagcaggacgactttgaccacctggcgacgctaaccgaaaccatcaaaaccgaagaactgctgactttaccggcaaacgaagtgttgtggcgtttgtatcacgaagaagaggtgacggtttacgatccgcaggatgtggagttcaaatgcacctgctcgcgtgaacgttgcgccgatgcgctgaaaacgctgcctgatgaagaagtcgatagcatcctggcggaagatggcgaaattgacatgcattgtgattactgcggtaaccactatctgttcaatgcgatggatattgccgagatccgcaacaacgcgtctccggcagatccgcaagttcattaatgagtatgtccggcagagaggactctgccggattttacgacgtaatggcctgatgcgcttatcagacctacggattcaatgcaatttatcgcaggtaagataatgtgccgaatccaataaaaatcagatatgcgctgtcattcattcagattcaaatccagtctttcgccatccaccgtaagatcgcgccacactttaggcttcgtccccagttttccatcctccgcagccatgagtaatttttctttcgttattacagccgggagtgaattcatcgtaatctctttccattctttcccagcaggatcaataccatagacaatgtatctttcatcattaaaggcaaacaggatccgctctgccctgccatcactattcagatcttgctctaccagcacgcaggcatctttttcaatgcatatcattgcgttatagcgatttttcatcactgccgaccagaatatcgtatccggttttccagaacctgaggcaataaatacattatctgctaatgctttttccgatatctgctgctgaagacgttgtactccatcaaaagccatcagcagaccccgcctgcgtttcgggtctttcatatactcggcatcgcttttcagcgactcaagcgccgcacgtccatagcgaccgctctgttcgagcatatagagacttacctggtctggcgtgtttttgccgctctgataacgcgccatatgactgttcacgctaatgcgcatactgtccagcaccggagaattaagaagcaccagtattaccaacaccaataacgaaaccgcaaggttcactttgccctgaagaacaagggggttttgccctttacgccagacgatactgacaaaataccccagcgaccataccagtaacaccagcaccgccagcgcgccctgcaagcggtcgacagtccagccgtactgagcgacccgcatccataacgcccaggcggcgacgaacacatacagcggagcaaccagcaaagcggttttaatcaggcaacgcaacggccccgtccagggaagtgacgctttttgcggatcgcggacaatagccattaagatcaattgcaaaaaggccagcgtcaacagcaacccggcggcggaaatgtggcgagaaatcgcgctcaggcccgtaaacggcagggtgatgataaacatcagggttagcaatgatactaacggcagcaaccccgtggcgattaacgtgaacaacttttgaatagagtcgattaaacgtgactgtgtacgcgcgaggatcaccgccagtgcggtaaccagacctaacgtgagataaataaacccgtcggttgcaaaaaagagcgttttgaaaaacgtgatgccaacaagtttaaacaactctccccacagtaaaagtaccagccacgtcaggccattggcgagaaaaatcaccagtaatataagtacgttatgccatactgactggtaaaaatagcgatagcggctactgtcattgcggatgcgaaggctttgttgtatccacggtagcaacaacattgccatcagcagcagatagcagccaaaatcccaaagcgccttttctgctctccagtggttcatgccatcaatttgccactttagccaaccgctcattcccagcgtggcaataaacaccagcgccagccatccccaaaggcgcttctgtttaaaggagatcacggagaagagtaaaacggatgaaaacgcgacggtcgcaggcacgccataaacaatccaactgtgattttttccggcaagccaggcgatcagcaggtagcaaaccagcccctgaagtaatccggtagcaatcatcccccagcgtgttgccggtgaaagttcaacgttatccatgttggttatccagaatcaaaaggtgggttaattatcgcatccgggcagtagtattttgcttttttcagaaaataatcaaaaaaagttagcgtggtgaatcnatactttaccgattgaatttgcatcaatttcattcatgaatgcgattccactcacaatattcccgccatataaaccaagttttaaccttttgagaacattttccacacctaaaatgctatttctgcgataatagcaaccgtttcgtgacaggaatcacggagttttttgtcaaatatgaatttctccagatacgtaaatctatgagccttgtcgcggttaacacccccaaaaagactttactattcaggcaatacatattggctaaggagcagtgaaatgcgcgttaacaatggtttgaccccgcaagaactcgaggcttatggtatcagtgacgtacatgatatcgtttacaacccaagctacgatctgctgtaccaggaagagctggacccgagcctgaccggttatgagcgcggggtgttaactaatctgggtgccgttgccgtcgataccgggatcttcaccggtcgttcaccgaaagataagtatatcgttcgtgacgataccactcgcgatactttctggtgggcagacaaaggcaaaggtaagaacgacaacaaacctctctctccggaaacctggcagcatctgaaaggcctggtgaccaggcagctttccggcaaacgtctgttcgttgtcgacgccttctgtggtgcgaacccggatactcgtctttccgtccgtttcatcaccgaagtggcctggcaggcgcattttgtcaaaaacatgtttattcgcccgagcgatgaagagctggcaggtttcaaaccagactttatcgttatgaacggcgcgaagtgcactaacccgcagtggaaagaacagggtctgaactccgaaaacttcgtggcgtttaacctgaccgagcgcatgcagctgattggcggcacctggtacggcggcgaaatgaagaaagggatgttctcgatgatgaactacctgctgccgctgaaaggtatcgcttctatgcactgctccgccaacgttggcgagaaaggcgatgttgcggtgttcttcggcctttccggcaccggtaaaaccaccctttccaccgacccgaaacgccgcctgattggcgatgacgagcacggctgggatgatgacggtgtgtttaacttcgaaggcggctgctacgcgaaaactatcaagctgtcgaaagaagcggaacctgaaatctacaacgctatccgtcgcgatgcgctgctggaaaacgtcaccgtgcgtgaagatggcacaatcgactttgatgatggttcaaaaaccgagaacacccgcgtttcttatccgatctatcacatcgataacatcgttaagccggtttccaaagcgggccacgcaacgaaagttatcttcctgacagcagacgcctttggtgtgctgccgccggtttctcgtctgactgccgatcaaacccagtaccacttcctctctggcttcaccgccaaactggccgggactgagcgtggcatcaccgaaccgacgccaaccttctccgcctgcttcggcgcggcgttcctgtcgctgcacccaactcagtacgcagaagtgctggtaaaacgtatgcaggcagcgggtgcgcaggcgtatctggttaacaccggctggaacggcactggcaaacgtatctccattaaagatacccgcgctattatcgacgccatcctcaacggttcgctggataacgcagaaaccttcactctgccgatgtttaacctggcgatcccaaccgaactgccgggcgtagacacgaagctcctcgatccgcgtaacacctacgcttctccggaacagtggcaggaaaaagccgaaacgctggcgaaactgtttatcgacaacttcgataaatacaccgacacccctgcgggtgccgcgctggtagcggctggtccgaagctgtaatcagctgatatctcattgaccccttatccaaacggataaggggtttttttatatctaattagctaccaatatgtacacttataattatcaatagaccgcaggatgcattatgttcacctttattgaactacaaggatttagcaaacgccgccagttattgctacctgataagtagttccgggcttttcaggaactactcattcaagatcccactgccggtgacattatcgcaggcacaggcagttttagaaaaattcgctggaaccgttctggaatggggaaacggggtggcattcgaataatttattacaacgtaacacgcaatggtcgaatttatctggcgttgatttatcctaaaaatgaacaggatgatttaacagaagaacaaagaaaggcattgaaactattgtccgagaagctgctttaatgttgaagctccacaaattccaccatggtcgaaatgccaacggagacattgaaaacagatgaaagatgaattatttgctgatcttcttgccagcgcagaagaaatggtacgcatcgaaaagggtgaagaaacgcctgaaccagagcacgtccatacttttagcgaaatcgatgtaaaagcgatccgtgaagcaacgggtttacgtcagcaagattttgctgtcgccgtaggggtaagttatgacctggtcaaaagctgggaaaccaaacgccgtcagcctaccggagcaccccgaaaattgctcctgcttttgcaagcgaatcctttcattatcaatcaattgaaaacaatctaaaaacgggaggcaccttcacctcccgtttttttacccttcttttgtcatgccctgcgcccgcgttaccggcactggcagccaggcgcgaatggaaagcccgccccgttcgctggtgccaagctccagcatcccgttatggttatccacgatacgctgcacaatcgccagccctaatcccgtgccgctaatagtgcgcgcactgtcgccacgaacaaacggctggaacaggtgcttacgctgttctggcgcaatacccggaccgtcatcttctacctgaaaccaggcgcgattcggctccgtgccgctgctgactttgatccagccattgccatagcgggcggcgttcaccaccatattcgctaccgcgcgtttgatcgacagcgggtgcattttcacctcaatgctaccggggtaaagcgcagtttcaatttcccgctcatagccactttcggcagcaataacctcaccgagtactgcgttgagatccgccatttccatcggcatctcctgcccggtgcgcaggtagtcgataaactgctcaatgatggcgttgcactcttcgatatctttattgatcgattctgccaggtagccatcctgctcgctcatcatctcggtcgccagacgaatacgcgtcagcggcgtgcgcagatcatggcttacccccgccatcagcagcgtgcggtcatccgccagttgcttaacaccagccgccatatggttaaaggcgcgggtaacggaacgcacctccgaagcgccatattcacgcagcggcggcggaataatccctttacccacctgcaaggctgcgtgttcgagatcgaccaacggtcggttctggatacgaataaacagccacgccccgcctatcgccaatagcataatcgccaacgtataacggaacagcggggagaaatcgccctgatgaatttcggttagcggcacgcgtacccagatattgggcgacaaccaggttttcagccagacgacaggcgaacttttgttgacctcgacgcgaacttccgtcggaccgcccagttgctgcgccatctgatggcttaagaattcatagtgttgcgcccaacgcagacctgcctcttcggcagcttcgttggaatagagagagatccccagctcacggtagatctcccgacggaaagcgggaggcacaaccaactgcgtgccgtcctccagttgcagtttgtcggtcatcaacatacgcacttcgtacgcgaggactttattaaactgctggaggctcggcaaaatcgcgaagttcagcaccaccagataagtcgtcaccaggctgacgaacagcaaggtgacgatgagcaataacgtacgggcaaatgaacttcgtggcgagaagcgcaatcgcctcatgctttagaaccgtccggtacaaagacgtagcccagaccccagacggtctgaatgtaacgcggatgcgccggatcttcttccaccatgcggcgcagacgcgaaatctgcacgtcgatggagcgttccattgcggaatattcacgaccacgggcaaggttcatcagcttatcgcgggagagcggctcacgcggatggctgaccagtgccttcagtaccgcaaactcaccactggtgagcggcatcggctcgtcttcgcggaacatttcgcgcgtaccgaggttaagtttgaacttaccgaaagcaattaccgcctcttcctgtgacggtgcgcctggcagttcgttcgcctgacgacgcagcaccgcacgaatgcgggccagcagttcacgcgggttaaacggttttggaatgtaatcgtcagcgccaatctccaggccaacgatacggtccacttcttcccctttcgccgtcaccataatgatcggcatcggattgctctggctacgaagacgtcggcaaatcgacaagccatcttcaccaggtaacatcaaatccagtaccataagatggaaagattcacgagtcagcaggcgatccatctgttctgcattagcgacgcttcgaacctggaagccttgttcggtgagataacgttccagcagcgcgcgcaggcgcatgtcgtcatcaaccaccagaatcttgtagttctcttgcattgtttgtactcccaaaggttcgcaacaatttgtaagcgtgtattcttaaaaaagctcacgttcgtcaccagctaaatctggtatgaatttcagcctaaattgttacaaagcatattaaacagcagcttaagtatacaatttattcggcgaaacattattgattctgttgatatgatcacgttatacccaatgtgcgcattatcaaacagacaaagggaatcaacgagatgaaaacgcccctggttacccgggaagggtatgaaaaactcaaacaagagcttaattatctctggcgtgaagaacgcccggaggtcacaaagaaagtgacctgggccgcaagtctgggcgaccgcagcgaaaatgctgactatcagtataataaaaagcgcctgcgtgaaatcgaccgtcgcgtgcgctatctcactaaatgcatggaaaatctcaaaatcgtcgattactccccgcagcaggaaggcaaagtcttttttggcgcgtgggtggagattgaaaacgacgatggcgtgactcaccgtttccgtattgtcggctacgatgaaatttttggccgtaaagattacatctctatcgattccccgatggcccgcgcattgctgaaaaaagaagtcggcgatctggcggtggtgaatacccctgccggggaagcgagctggtatgttaatgctatcgagtacgtgaaaccgtaaggaagagtcttaacctcctgccgatggctggcatttttgccagccagtccgtataactatcccctgatttttgatccgaaaagatgaactcaaaccatgatgaatgattcgttctgccgcattattgcgggtgaaattcaggcgcgcccggaacaggttgacgctgccgttcgcctgcttgacgaagggaataccgtgccgtttatcgcacgttatcgtaaggaaatcaccggcggtctggatgacacgcagctgcgtaatctggaaacgcgtctgagctatctgcgcgagctggaagagagacgtcaggcgatcctcaagtccatttccgagcaaggcaaactcaccgatgatctggcgaatgccatcaacgccaccctaagcaaaaccgaactcgaagacctctacctgccctacaaacctaaacgccgcacccgtgggcaaatcgccattgaagcagggcttgagccgttggccgatctgctgtggagcgatccgtcacacacgccagaagtcgccgctgcacaatatattgatgccgataaaggcgtggcagataccaaagccgcgctggacggcgcgcgctatatcctgatggaacgttttgccgaagatgctgcgctgctggcgaaagtgcgtgattatctgtggaagaacgcgcatctggtctcaaccgtggtgagcggtaaagaagaggaaggggcaaaattccgcgactatttcgatcatcacgaaccactgtcaacggtgccttctcaccgcgcactggcgatgttccgtggtcgtaacgaaggcatacttcagctttcgctgaatgccgatccgcagttcgaagagccgccgaaagagagctattgcgagcaaatcatcatggatcaccttggcctgcgcctgaacaatgccccggcggatagctggcgcaaaggtgtggtgagctggacgtggcgcatcaaggtgttgatgcatctggaaactgaactgatgggcaccgtgcgcgaacgcgcggaagatgaagcaatcaacgtctttgcccgtaacctgcacgatctgctgatggcggcccctgccgggctgcgtgcaacgatgggcctcgatccgggtctgcgtaccggggtaaaagtggcggtagtcgatgcaactggcaaactggtggcgaccgataccatttatccgcataccgggcaggccgcaaaagcagcgatgaccgttgctgcgctgtgtgaaaagcataacgttgaactggtggcgatcggcaacggtacagcttctcgcgaaaccgaacgtttctatctcgacgtgcagaagcagttcccgaaagtgaccgcgcagaaagtgatcgtcagcgaagctggcgcgtcggtttactcggcttccgagctggcagcacaggaatttccggatctcgacgtttcgctgcgtggcgcggtgtctatcgcccgtcgtttgcaggatccgctggcggagctggtgaaaatcgatccgaaatctatcggcgtaggtcagtatcagcatgacgtcagccagacgcagctggcacgcaaactggatgcagtagtagaagactgcgtaaacgccgttggcgtcgatctcaacaccgcttctgttcctctgttaacccgcgtggcgggcctgacgcgcatgatggcgcaaaacatcgtggcctggcgcgatgagaacggccagttccagaaccgtcagcaactgttaaaagtgagccgtctggggccgaaagccttcgagcagtgcgcgggcttcttgcgcattaaccacggtgataacccgctggacgcttctaccgttcacccggaagcctatccggtggtggaacgcattctggcagcaacacagcaggcactgaaagatctgatgggtaacagcagcgaactgcgtaacctgaaagcatctgactttactgatgagaaattcggtgtgccgacggtaaccgacatcatcaaagagctggaaaaaccgggtcgcgatccgcgtccggaatttaaaaccgctcagtttgccgatggcgtcgagacaatgaacgacctgcaaccgggtatgatcctcgaaggtgcggtgaccaacgtcaccaactttggcgcgtttgtcgatattggcgtgcatcaggacggcctggttcacatctcttcattgtcgaacaagtttgtggaagatccgcataccgtggtgaaagcgggcgacattgtgaaggtgaaagtgctggaagtggatcttcagcgtaaacgtatcgccctgaccatgcgtctggacgagcagcctggcgaaaccaacgcccgtcgcggcggcggtaatgaacgcctgcaaaacaaccgcccggcagccaaaccgcgtgggcgtgaagcgcagcctgccggtaatagcgcgatgatggacgcgctggcggcagcaatgggtaaaaagcgttaaaccccctgattggcctacggttcaaattttcacgaaatcgtaggccagataaggcgttcacgccgcatctggcaatacacgccttgcctgacataaaaatgccggagtatatctccggcatttttattccacagccaaccccacaatatactccctaatatttatcacttcattaacaactgagaccttaattaaacattaaccagccctaataattcgtcatgcgaattatattttcgctgcgatataaccttgagccatatcaacattgagtcagattattattcaaaccaacattcacacacattttaagtattgctgatagaaaccattctcattatcattgtactgttgattatttaatctctccttcgttggcaaatcatctggtctcatgtcgctgtcaaacgccccatgaggtagttatccagttaatgagaaacaagtaggcacctatgcaatacactccagatactgcgtggaaaattactggcttttcccgtgaaatcagcccggcatatcgccaaaaactgctttctcttggcatgttacctggctcctcttttaatgtggtgcgcgtcgctccactcggcgaccccattcatatcgaaacccgtcgtgtgagcctggtattacgcaaaaaagatctggccttattagaagtggaagcggtttcctgttaatacggtgataacaacaatgaaaaaattaaccattggcttaattggtaatccaaattctggcaagacaacgttatttaaccagctcactggctcacgtcagcgtgtaggtaactgggctggcgttaccgtcgaacgtaaagaagggcaattctccaccaccgatcatcaggtcacgctggtggacctgcccggcacctattctctgaccaccatctcatcgcagacctcgctcgatgagcaaatcgcctgtcactacattttgagtggcgacgcagacctgctgattaacgtggtggatgcgtctaaccttgagcgtaacctgtacctgacgctgcaactgttggaactcggcattccctgcatcgtggcgctgaacatgctcgacattgccgagaagcaaaatattcgcattgaaattgatgctctgtcggcgcgtcttggctgcccggtgatcccgctggtttcaacccgtggtcgcggtattgaagcgctcaagctggcgattgatcgctataaagctaacgaaaatgtggaactggtgcattacgctcagccgctgctcaacgaagcagattcactggcaaaagtgatgccttccgacatcccgctgaaacaacgtcgctggctgggcctgcaaatgctggaaggcgatatctacagccgcgcctacgccggtgaagcgtcgcagcatctggatgccgccctcgcccgtctgcgtaatgagatggacgatccggcgctgcacattgccgatgcgcgttaccagtgcattgctgccatctgtgatgtggtaagcaacaccctgacggcagaacccagccgtttcaccactgcggtagataaaatcgtgctcaaccgtttcctcggtctgccgattttcctctttgtgatgtacctgatgttcttgctggctatcaacatcggcggggcgttacagccgctgtttgacgtcggctccgtagcactctttgtgcatggtattcagtggattggctacacgctccacttcccggactggctgactatcttcctcgcccaaggcctgggcggtggtattaacaccgtgctgccactggtgccgcagatcggcatgatgtacctgttcctctccttccttgaggactccggctatatggcgcgtgcggcgtttgtgatggaccgtctgatgcaggcgctgggcttgccggggaaatcctttgtaccgctgatcgttggtttcggttgtaacgtaccgtcggtaatgggcgcacgtacgcttgatgcaccgcgtgaacgtctgatgaccatcatgatggcaccgtttatgtcctgcggcgcgcgtctggctatcttcgcagtattcgcggctgccttcttcgggcagaacggtgcgctggcggtcttctcgctgtatatgctgggtatcgtaatggcggtgctgacgggcctgatgctcaagtacaccatcatgcgcggtgaagcgacgccgtttgtcatggagctgccggtctaccatgtaccacacgttaaaagcctgattatccagacctggcagcgtctgaaaggcttcgttctgcgtgctggtaaagtgattatcatcgtcagcattttcctgagcgccttcaacagcttctcgctgagcgggaaaatcgtcgataacatcaacgactcggcgctggcttccgtcagccgggtgatcaccccggtcttcaagccgattggcgtgcatgaagataactggcaggcaacggttggcctgtttacaggtgccatggcgaaagaagtggtagtgggtacgctcaacaccctctacaccgcagaaaatattcaggacgaagagttcaatccggcggaatttaacctcggtgaagagctgttcagtgcggtagatgaaacctggcagagcctgaaagacaccttcagccttagcgtactgatgaaccccattgaagccagcaaaggcgacggcgaaatgggtaccggggcgatgggcgtgatggatcagaaattcggtagcgcagctgccgcatacagctacctgattttcgtcctgctgtacgtaccgtgcatctcggtgatgggggctatcgcgcgtgaatcaagccgtggctggatgggcttctccatcctgtgggggctgaatattgcttactcactggcaacattgttctatcaggtcgccagctacagccagcatccaacttacagcctggtgtgcattctggcagttatcctgtttaacatcgtggttatcggtctgctgcgccgcgcgcgtagccgggtagatgtcgaactgctggcaacgcgcaaatcggtaagcagttgctgtgcggccagcaccaccggtgattgccattaatggcttcacttattcaggtgcgtgatttgctggcgttacggggccgtatggaagcggcccagattagccagacactgaacactccgcagccaatgattaacgccatgctgaaacagctagaaagtatgggaaaagcagtgcggattcaggaagaacctgacggctgtctttccggcagttgtaaaagctgcccggaaggaaaagcctgtctgcacgaatggtgggcgttgcgttaaccttgtttcactgcctgttttgaaagcccggtatgcgtttgcatcctggcttttttgcgtgcggctttccataaaaatgcaacccttgcagcgcgacgtaagttcctctgaaagcgtctcgcagggatgaaaactcgctaatgcacaggtgtggagtggcgcgtagagtcgcggcattcaaataacaggtgaaggaacgccatgagcaaaaagcagagttccaccccacacgatgcgttacgccattgccgcaatgcaaaatcaccttgatgccggatacaaaacattgccgatggtggtgccattgttgttttatcacggtattgaaagcccctatccctattcgctgtgttggctggattgtttcgccgatcccaacctggcaaggcagctttatgcctctgcatttccgctgattgatgtcaccctcatgcctgatgatgaaatcatgctgcaccgacgtatggcgctactggagttaattcaaaaacatattcgtcaacgcgacctgatggggctggtagagcaaatggcctgcttattaagtagtggatacgctaatggcagacaaatcaaagggctgtttaattacatactgcaaaccggcgacgcggtacgttttaacgattttatcgatggtgtggccaaacgttcaccaaaacacaaggtgagtttaatgactattgcggaaagattgcggcaggaaggggaacaatccaaagccttgcatatagcaaaaataatgcttgaatccggagtccctcttgcagacatcatgcgctttaccggggtgtcagaagaagagttggctgcggcgagccagtaaagttctgtcccgccatttcgaaagccacctacaccctctgcttcaacgccaccagcagatgacaaaactcgtccggatgtgaaataaacggcgcatgggccgctttggcgaagatatatgattcgctgtgaggccaaagtttatccagcatcggcaccactttgcgcggcaccagaccgtcgagatagccatacaatcgcaaaaacggcatgggcacgttttgcagcggctgacggagatcgaccgttttcaggatttccagcccgccattaagcacgtcaacctccggcatcggtaacgccagaacggttttcttcaacgcccgcgcatcctggcgcgccgtttcagtacccatggtttgtaacgccaggaaccgctccactgtacgctgaaaatcatcactgagttgctgctgaaatcccgccagcacgtccggttttatccccggccactcgtcgcgagcactaaaacaaggtgacgacgccacggtgaccagcgccagaacccgctcgggatgggttaacgcaatctggcttgccaccagcccgcccagactccagcctaaccaaatggctttatctggtgcctgtcgcagcacgacttcggccatatcagcaagtgatagcgcaccaaatccccggctacgcccgaagccgggcaggtcaacaaggtgcagcgtaaaatgcgagctaagttcctcgtcaatgcaacgccacacttcggcattcagtccccatccgtgcagcagcacaagatgaacattcccctgacctttggtctgccaccagatgttattcatccgctattgttctctttttacttacaaggatgaacatatgctaacagtaccgggattatgctggctatgccgaatgccgctggcgttaggtcattgggggatttgttcggtatgctcacgcgccgcccgtacagataaaacgttatgcccccaatgtggattacccgccacacactcacatcttccctgcggtcgctgcctgcaaaaaccgccgccctggcaaagactggtcacggttgccgactatgcgccgccgttaagcccgctaatccaccagcttaagttttcccggcgcagcgaaatcgccagcgccctgtcacgtctgttactattggaggtcttacacgctcgtcgcaccaccgggttgcaattgccggatcgcatcatcagcgttccgttatggcagcggcgtcactggcgtcggggatttaatcagagcgatttgctgtgtcagccgttatcacgctggttgcactgccgatgggatagcgaagccgtcacacgaacacgggccactgcgacccagcattttctcagtgcccggctacgcaaacgcaacctgaaaaatgcctttcgtcttgaattgcccgtgcaaggtcgccatatggtgattgtggatgatgtcgtcaccaccggaagtaccgtcgcagagattgcgcagttgcttttacgcaatggtgcggcgactgtccaggtctggtgcctttgtcgaaccttgtagagcctcgatgatgggcgtattataaccaactaaaatagtcaactattaggccattactatgatccgtatttccgatgctgcacaagcgcactttgccaaactgctggcaaaccaggaagaagggacacaaatccgcgtatttgtgattaaccctggcacgcctaacgctgaatgtggcgtttcttattgtccgccggacgctgtggaagccaccgacactgccctgaaatttgacctgctgaccgcgtatgttgatgagttaagcgctccttacctggaagatgcagagatcgattttgttaccgaccagttgggttcgcagctgacgctgaaagcgcctaacgccaaaatgcgtaaagtggctgacgatgcgccgctgatggagcgcgtggagtatatgctgcaatcacagatcaacccacagcttgctggtcacggtggtcgcgtttcgctgatggaaatcaccgaagacggttacgccattttgcaatttggcggcggctgtaacggttgttccatggtcgatgtaacgctgaaagaggggatcgagaagcagttgctgaacgaattcccggagctgaaaggtgtacgcgatctcaccgaacaccaacgcggcgagcactcttactactaagttctctcctcttttgtcgattgcccgatgtgacgctaaagcgtcttatcgggcctgtacgttgcacgagagtctgacattagcgcagaattacctcagcaaatccaatctcttcgtttccccacgataatatgaccaacctctcataatttaaatttaccccgctctggtgattctcaagcacgtaatgttacccgtatcattctcatgggcaccaaacacactcataacatctgactacactaactcgttttaggggtcatcagccgtggtgccgtaacatctctgttcccagttgggacaaccaggattttccgtcagaaacctgacgttacccataacaaattaaaggccaggtaaatcatgccattagtcattgttgctatcggtgtaatcttgttattactcctgatgatccgcttcaaaatgaacggcttcatcgctctcgtcctcgtggcgcttgctgttggattaatgcaagggatgccgctggataaagttattggctccatcaaagccggtgtcggcggaacgctcggtagccttgccctgatcatgggttttggtgcgatgctgggcaaaatgctggcagactgcggtggcgcacaacgtatcgctaccacactgattgccaaatttggtaaaaaacacatccagtgggcggtggtactgaccggttttaccgttggttttgccctgttctatgaagtgggtttcgtgctgatgctgccgctggtgtttaccatcgcggcttccgcgaatattccactgctgtatgttggtgtaccaatggcggctgcactgtctgtgacccacggcttcctgccaccgcatccgggtccgactgcaattgccaccattttcaatgccgatatgggtaaaactctgctgtacggtactattctggcaatcccgaccgtgattctcgccggtccggtttacgctcgcgtgttgaaaggtatcgataagccgatcccggaaggtctgtacagcgcgaaaaccttcagcgaagaagagatgccgagctttggcgtcagcgtctggacctctctggtgccggtggttctgatggcgatgcgtgcgattgccgaaatgatcctgccgaaaggtcacgctttcctgccggtagcggagttcctcggtgacccggtaatggctacgctgattgccgtgctgatcgcgatgttcacctttggtctgaaccgtggtcgttcaatggatcagattaacgacacgctggtttcttccatcaaaatcattgcgatgatgctgttgattatcggtggtggcggtgcgttcaagcaggtgctggtagacagcggcgtggacaaatacattgcttccatgatgcacgaaaccaacatttctccgctgctgatggcctggtcgattgctgccgtactgcgtatcgcgctgggttccgcaaccgtcgcggcaatcactgcgggtggtatcgcggcaccgctgattgcaacgacgggtgttagcccggagctgatggttattgcggttggttccggtagtgtgattttctctcacgtgaacgatccgggcttctggctgttcaaagagtactttaacctgactatcggcgagaccatcaaatcctggtcgatgctggaaaccattatctcggtgtgcggtctggtaggctgtctgctgctgaatatggtgatttgataatactgatggccggatgcggcgtgaacgccttatccggcctacgattcggcattaattagtaggccggataagacgcgtcaagcgtcgcatccggcatcaaccgcactctacttcttcttcgctgccgctctgcgccgtctgtccaaatccttcagcaatttgttcacaccatcatcggcaaacatcgactcaagcgttgcggaaagtttacgtcgccagtttttatactggtaactggtgccgggaatatttaccggatctgccatatccagccagtcttccggctgtagccctaacagggcgctgttgctatcggcgatgtagcgctgtaagccacgattcagcgtcggtgtcatcgacatcaacgatgccttatgcccggcacgttttggcaggcaaccatatttatgcagagcatccagcagcccttgcttcgccagttcgcgatcctgatacagaccgcgcagtaccacttcatccggatacagccccagcgttttgcccagcgttaaatccccactctcccagtagccgcgtagcgtaggcaggtcgtgtgtcgccgcaaccgccatcgactgctctgggtacgctttcggtgcgcggaatgtcttctcgtggtcgttttcgaaatagagcactttgtaggagtacacaccgctgctgcgcagcttaccgacaatctctaccggtacggtaccgagatcttcaccaatcaccatacagcgatgacgtttactttcgagtgccagaatcgagagcagatcatccaccggatagtgaacatacgcgccctgatctgccgtctcgccatacggtatccaccacaaacgcagcatcgacatcacgtgatcaattcgtaatgcgccgcagttttgcatattggcacgcaacagctcgataaacggttcataggcacgcgcggtgatgatatgcgggtccattggcggcaatccccagttctgccccaacgggccgaggatatccggcggcgcgccaaccgacgctttcaggcaatacagttcacggtcgcaccaggtttctgccccaccttctgctacaccaacggccagatcacgatacaagccaatcggcatttcatagccctggcttatctcccagcaggcggcaaactggctgtaagccagccactgcaaccagagataaaaatcgacgtcatcacgatgttcttcgcagaactggcgcacttctggtgaatccacgttctgatacatctctggccatgctggccagccccagcacatttcgtcctctttcacttgctgggcatgtagcgcatcaaaggctgcctgccagaacaggctgtcgccctgctctgcaacaaactggcgaaacgcggtcatctgctcatcatcacgttgcgcgaaacctttccacgccattcgtaatgctgtcatttttagggcggtaaccgtggagtaatcaacccagtcggcatcccgcgcctgttgcagcgtctgttgcgtggtcggcaactgccaccaggcctgagcctcttcgctaagatggaaatcttcaactgcgttaacgtcgatataaatcacattcagccaacggcgagaagacgggctgtacgggctggcactttccggatttgccagatagagcgcatgaatcgggttcagaccaataaacgacccgccacgttttgccacatccaccagcatcgctttgagatcgccaaaatccccaataccccagtttttttccgatcgcagcgtataaagctgaacgcaggcaccccacagcttttgtttattcagcaacgcctgcggttcgtaacagcgtttcggggcgacaatcacccggcaatgcgcgcgctggtcgtcctgggtaagcgtcagcgtgtgataaccttccggcagcttcgtcggtagattgaacgctttgccccccgtcacatggcctttgtactgctttccttcttcggtagtcagcagccagctaaattcaccgctgccctccaccaccatcggcatttttttgccgctggtataaaccatgacattcgggactggcgttaccgccactttcgtggcggtacgttgatgcatcgcgtcaagcaaacgccgtttggtttcggcgctaatcgactgcggtttaccgtgggcattgatgtaattggagctgatccccgccgccagcgcggcattatccagacgtttgctttccatcgagcttccttagcgttttgcctgccagatacgagcctgataatcgcgaatagagcgatccgagctaaacataccgcagcgggcggtattgaggatcgccgcgcgagtccaggcctcctggtcgcggtacagcacatccacctgcttttgtgcctctacataagcggcgaaatctgccatcaccagatacggatcgccgccctgtttgccgatactgtgcagcatctggtcgaaggcatgcttatcgccgtcgctgtatttaccgctttccagctctttcaatactgcgtccagcaccttatctttcttccgccatttcaccgggtcgtagcctttggccagaattgccttcacttgttccacggtatgaccaaaaataaagatattttcttcaccgactttctcagcgatttcaacgttcgcaccatccagcgtaccgacagtaagcgcaccattgagcgccagtttcatattgccggtaccggaagcttctttacctgcagtcgaaatttgttcggagatatccgccgccgggatcagtttttccgccgccgaaacacaataatccggcaagaacaccaccttcaacttgtcgccaaccagcggatcgttgttgatcacgtcagccactttgttgatcgcaaagataatatttttcgccaggtagtagcccggtgctgctttcgcgccgaagaggaagacgcgcggtacgcggtcagactgcgggttttcacgaatttctttgtacaacgccagaatatgcagcagattcagatgctggcgtttgtactcatgcagacgtttgatctgaatatcgaaaatcgcctgtggattgatctcaataccggtacgaactttcacaaactctgccagacggactttattcgcctgcttgatctcgcgatattgctgacggaatttcgcatcatcagcgaatttttccagattgatcagttgatcgagatcgttagcccactcttttttcagtgatttatccaacagagccgccagtgccgggttgcactgtttgatccagcgacgtggggtaataccgttggtgacattatggaatttgttcggccatagctggtgatattccgggaacagatctttcaccaccagatccgagtgcagcgccgcaacaccgttcaccgcgaaaccgccaaccacacacaggttcgccatatgcacttgtttgtcgtgtaccaccgccagtttggcccacactttttcatcgcccggccaggttttttccaccagcgttttaaagcgagtattaatttcgttaataatctgcatgtggcgcggcagtaagcctttcaccagtttcacatcccagcgttccagcgcttctggcatcagggtatggttggtgtaagcgaaagttttgctggtgatggcccaggcgtcatcccagctcatctggtgctcatcgatcagcacgcgcagcagttctggaatcgcgatagttgggtgggtatcgttcagctgaataacttcgtaatccgccagttcgtgcagtttacgccccgccagatgatggcgacgcaaaatatccgctaccgagcaggcacactggaagtattgctgcatcaggcgcagctttttaccggcagtatggttgtcgtttggatagagaactttggtcagtttttccgcgttgatgccctgctgttcggcacgcaggaaatcaccgtcgttaaatttagtcagatcaaacggatgcgcatgcgtcgcctgccacagacgcagtggctgcgccacgccattacgatagccgacaacggggagatcccacgcttgaccggtaatggtaaactccggctcccagcgtccatctttcgtcactttaccgccaatccctacctgcacatccagtgcttcgttgtggcggaaccacgggtagttaccgcgatgccagtcatccggcgcttcaacctgtttgccatcgacaaatgactggcggaacaagccatattgataattaaggccgtagccagtagctgactgcccgacagttgccattgagtcgaggaagcacgccgccagacgtcccagaccaccgttccccagcgccgggtcgatctcttcttccaacaggtcagtcaggttgatgtcataagccttcaacgaatcctgtacatcctgataccagccgagattcaacaggttgttgcccgtcaggcgaccaatcaaaaactccattgagatgtagttaacatgtcgctgattcgccactggcttggcgaatggctgagcacgcagcatttcggccagtgcttcgctcactgccagccaccactggcgaggagtcatttcagccgcagaatttaagccataacgctgccactgacgtgaaagcgcttcctgaaattgcttatcgttaaaaataggttgtgacataggagttccacttttcttagattttcaacacaacgttatcgctagtttgccaggctcgatgttgaccttcctcatcctgcgggggattaggcagggaggagttgcggggatgagcaaggaaatgtgatctcgaccacttaaagctagtgcaatccacaggattagcagcaaatcaatgccataccgcgcagaaaatctgtatctaagtgcaaaaaatggccgttgcgtattttcaaaaagcggaaggtaactctataaattaagtaaaggagtgaaacagtttcacaagtaaaatatcaagtgtgctccatctcattcttaatagatttattaagatcatctttttagatggcactttcatcagaaatgaagaagaaacccttgcttaaatgaaactgatgaacataaggaaaataccgtacaacccagtattcacgctggatcagcgtcgttttaggtgagttgttaataaacatttggaattgtgacacagtgcaaattcagacacataaaaaaacgtcatcgcttgcattagaaaggtttctggccgaccttataaccattaattacgaagcgcaaaaaaaataatatttcctcattttccacagtgaagtgattaactatgctgattccgtcaaaattaagtcgtccggttcgactcgaccataccgtggttcgtgagcgcctgctggctaaactttccggcgcgaacaacttccggctggcgctgatcacaagtcctgcgggctacggaaagaccacgctcatttcccagtgggcggcaggcaaaaacgatatcggctggtactcgctggatgaaggtgataaccagcaagagcgtttcgccagctatctcattgccgccgtgcaacaggcaaccaacggtcactgcgcgatatgtgagacgatggcgcaaaaacggcaatatgccagcctgacgtcactcttcgcccagcttttcattgagctggcggaatggcatagcccactttatctggtcatcgatgactatcatctgatcactaatcctgtgatccacgagtcaatgcgcttctttattcgccatcaaccagaaaatctcacccttgtggtgttgtcacgcaaccttccgcaactgggcattgccaatctgcgtgttcgtgaccagctgctggaaattggcagtcagcaactggcatttacccatcaggaagcgaagcagttttttgattgccgtctgtcatcgccgattgaagctgcagaaagcagtcggatttgtgatgatgtttccggttgggcgacggcactgcagctaatcgccctctccgcccggcagaatactcactcagcccataagtcggcacgccgcctggcgggaatcaatgccagccatctttcggattatctggtcgatgaggttttggataacgtcgatctcgcaacgcgccattttctgttgaaaagcgccattttgcgctcaatgaacgatgcactcatcacccgtgtgaccggcgaagaaaacgggcaaatgcgcctcgaagagattgagcgtcaggggctgtttttacagcggatggatgataccggcgagtggttttgctatcacccactgtttggtaacttcctgcgccagcgctgccagtgggaactggcggcggagctgccggaaatccaccgtgccgccgcagaaagctggatggcccagggatttcccagcgaagcgattcatcatgcgctggcggcaggcgatgcgctgatgctgcgcgatattctgcttaatcacgcctggagtttgttcaaccatagcgaactgtcgctgctggaagagtcgcttaaggccctgccgtgggacagtttgctggaaaatccgcagttggtgttattgcaggcgtggctgatgcaaagccagcatcgctacggcgaagttaacaccctactggcccgcgctgaacatgaaatcaaggacatcagagaaggcaccatgcacgcagaatttaacgctctgcgcgcccaggtggcgattaacgatggtaatccggatgaagcggaacggctggcaaaactggcactggaagagctgccgccgggctggttctatagccgcattgtggcaacctcggtgcngggtgaagtgttgcactgcaaaggcgaattgacccgctcactggcgttaatgcagcaaaccgaacagatggcacgccagcacgatgtctggcactacgctttgtggagtttaatccagcaaagtgaaattctgtttgcccaagggttcctgcaaaccgcgtgggaaacgcaggaaaaagcgttccagctgatcaacgagcagcatctggaacagctgccaatgcatgagtttctggtgcgcattcgtgcgcagctgttatgggcctgggcacggctggatgaagccgaagcgtcggcgcgcagcgggattgaagtcttgtcgtcttatcaaccacagcaacagcttcagtgcctggcaatgttgattcaatgctcgctggcccgtggtgatttagataacgcccgtagccagctgaaccgtctggaaaacctgctggggaatggcaaatatcacagcgactggatctctaacgccaacaaagtccgggtgatgtactggcaaatgaccggcgataaagccgccgctgccaactggttgcgtcatacggctaaaccggagtttgcgaacaaccacttcctgcaaggtcaatggcgcaacattgcccgtgcacaaatcttgctgggcgagtttgaatctgcggaaattgtcctcgaagaactcaatgaaaatgcccgcagtctgcggttgatgagcgatctcaaccgtaacctgttgctgcttaatcaactgtactggcaggccggacgtaaaagtgacgcccagcgtgtgttgctggacgcattaaaactggcgaatcgtaccggatttatcagtcattttgtcatcgaaggcgaagcgatggcgcaacaactgcgccagcttattcaactcaatacgctgccggagctggaacagcatcgcgcacagcgtattctgcgagaaatcaatcaacatcatcggcataaattcgcccatttcgatgagaatttcgttgaacgtctgctaaatcatccggaagtgccagagctgatccgcaccagcccgttgacccaacgtgaatggcaggtcctggggctgatttactccggttacagcaatgagcaaattgcaggcgagctggaagtggcggcaaccaccatcaagacgcatatccgcaatctgtaccaaaaactcggtgtcgcccaccgtcaggccgcggtacaacacgcgcagaaactgctgaagatgatgggatatggggtatgagtttagccggataatgcgccagatccggcttacatctttacatcattcaatgctcacccgcgttacgccatctgtttctatcagactaaaccgcactggcaagaaacgctccaccaccgcgatattggtctgcagatggcatgagggatgggcgaccgtaaattctcccgcccccgccagcgccatcggtagcaccagttggtcggcgagatattcccccaccgccgccgggcttgccaggtagcgtttcacctctttcaccaactgtgccgcgaccacctcggcactgacgcgcttttcaccgacgacaaaaaagcgttcggtgatattttcactttcgacttcaagcgagacggtattacccggcccctggtcgcgcggcaggttatgaatattctgttcatgcaaggaaaaactacccgccagtgtagcgatttcacgctcagcaacatggcgcggcacaccagccagtagcacctctccacgcatctgcacaatgttcccgcgctcgccaagttgcaagctattaaacgatgccaccggtgagacttccgttgctaccacgccgcctccggcaggataaaaaccgtgacgtaacagcgtggtttgctgatgaactcctattctcgccagcagcggctccagcacccgacggataaaatccgcaggcggggccgacgggttatcggtgccgccgctcacttcaacacgcgaaggtccatcggcaaaccacagcgcgggcagcaccgtttgcagcaccagcgtacaacttccggcgctaccgatagcaaagcggtaatcgccgccgcgcacggtgccaggtcggaagaccagacgctgcgaccccagctcagcgccttccaccgttgccctacaaatttccgcagccgcttttaccgcggtcagatgttggcgcaacagccccggtttcgcccgcccggcacgaatgccggtgatggtaaatggctggccggttatcatcgacaggctcagcgccgagcgcaggatctgcccgccgccttcgccctgtgcgccatccagcgcaatcatccttttcatcatttatccttttacgcacaccacctgacgcagggtatagataacttccaccagatcgctttgtgccgccatcaccgcatcaatatctttatacgccatcgggatttcgtcgatcacctcggcatctttacggcactccacatgcgcggtggcacggatttgatcttccacactgaacagttttttcgctttagtacggctcattacccgcccggcaccgtggctgcacgaacagaacgactcttcatttcccagcccacggacgataaagcttttcgcccccatcgaaccgggaataattccatattgaccagcacgcgcagacaccgcgcctttacgcgtcacatagatctcttcgccaaagtgcagttctttttgcacatagttgtggtgacagttgatctcttccatcgccagcgtttgtggctgttttaccgttttctgcataacgctctgcaacgccgttaccacgttttccatcatcgcatcgcggttaaggctggcaaaaagctgcgcccaggccacggctttcaggtaatcatcaaagtattccgtaccttccataaagtacgccaggtcacgcgatggcaacgtttcaagcgtttcctgcatctctttttgcgccagatcgataaaataagttccgatggcgttaccaattccgcgtgaaccggagtgcagcataatccacacctgatccgactcatcaaggcaaatttcaataaagtggttacccgtacccagcgttcccaggtgtttatagttattagtgttaaggaaacgcggatatttttgcgttaaccactgataaccggcctccagctcagcccatttcgcatcgacgttaacaggcggattttcccatgcgcctttatcacgtttacaacgcccggtagtacgtccgtgcggtacggccgtttcaatcgcctgacgcagctctgccaggttttcaggcaggtccgccgccgttaacgcggtacgcagtgcgttcattccacagccaatatccacgcccaccgccgccggaataatcgcccctttggtcgggatcacgctaccaatggtggaacctttacccaggtgtacatcaggcattaccgcaatatgtttgaaaataaatggcatcttcgcggtattaataagttgctgacgcgcatcggcttctaccggcacgcctttggtccacatttttaccggagcattttcagtggtcagtaattcgtaattcattttgtttttctcttttcgttgtttgctgtcctgataattgcaaccgtcgtgccagaaaatcaaataagcatattaattttttaattcattgtttttaaaaatattatatttttacgtccgtaaacggagatttcccgcaaagccgatttaccgataatgaaatctcgtcttttataaggatatctaagatgcgtaaaacagtggcttttggctttgtcggaacggtgctggattatgccgggcgcggcagtcagcgctggtcaaaatggcgtccgacactctgtctatgccagcaagaatcgttagttatcgatcggctggaattattgcacgacgcccgctcgcgctcgctattcgaaacgcttaaacgcgatatcgccagcgtttcgccagaaacagaagtggtgggcgttgagatagaactgcataacccttgggatttcgaagaggtttacgcctgcctgcatgatttcgcccgtggttacgcgttccagccagaaaaagaagactatttaattcacatcaccaccggtacccacgtcgcgcagatttgctggtttctgctggcagaagcgcgttacctgcccgcccggttgatacaatcttcaccaccgcgcaaaaaagagcggcccgatagccctggcgcggtgacgattatcgatctcgatttaagccgttataacgccatcgccagccgctttgccgaggaacgccagcaaacgcttgattttcttaagtccggcattgccacgcgtaactcccacttcaaccgcatgattgagcagatcgaaaaagtggcgatcaaatcccgcgcaccgatcctgcttaacggcccgaccggtgcgggtaagtcatttttggcgcgacgcatctttgaattaaaacaggcacggcatcagtttagcggcgcgtttgtggaagtgaactgcgccaccctgcgcggcgataccgccatgtcgacgctgtttggtcatgtgaaaggcgcgtttaccggggcgcgggaatcgcgtgaaggattattacgcagcgccaacggcggaatgttgtttcttgatgagattggcgaactgggcgcagacgaacaggcgatgttgctaaaagccattgaagagaaaaccttttacccgtttggcagcgatcgccaggtgagcagtgattttcagcttatcgccggaacggtgcgcgatttgcgccagttggttgccgaaggcaaatttcgtgaagacctgtacgcgcggatcaatctctggaccttcaccttgccaggattacgccaacgccaggaagatattgaaccgaacctggattatgaagtggggcgccacgcctcactcactggcgacagcgtgcgttttaacaccgaagcgcggcgtgcctggctggcctttgcgacctctccccaggcaacatggcgcggtaactttcgcgaactttctgccagcgtcacgcggatggccacctttgccactagcggacgcatcacactggatacggtggaagatgagatcaaccgtctgcgctataactggcaggagagtcgcccctccacgcttacggcgttgctgggcgcagaggcagaaaacatcgatctcttcgaccgtatgcaactggaacacgttatcgctatctgccgccaggcaaagtcgctttctgctgccggacgtgaactgtttgacatttcgcgccagggtaaagccagcgtcaatgacgcggatcggctacgcaaatacctggcgcgttttggtctgacatgggaagcaatgcaggatcagcacagctccagttgaatatgatggtccttcagcacctgcatcacgctcgcaggcggcatcgtgtcggtgtagacagcatcgaccatgctgatgctacccatattgaccattgcgttacggccaaattttgagtggtcgacaaccagcataacgtggcgcgagttctcaatgatggcgcgtttggtgcgaacttcgtggtaatcgaactccagtagcgagccgtcgctatcgatgccgcttatccccagaatgccgaaatcaaggcggaactgggagataaaatcgagcgttgcttcgccaatgatcccgccatcgcggctgcgtaattcgccaccggcaagaatgatacggaaatcctcttttaccatcagcgtgttagcgacgttgagattgttggtcacaatgcgtaaattgctgtgattaagcagcgcgtgcgccaccgcttccggcgtggtgccgatatcgataaacagcgtcgagccattgggaatttgctccgccactttgcgggcgatgcgctctttttcttcggtctgggtggccttgcgatcgtgccacggcgtattaaccgaactggaaggcagcgccgcaccgccatgatggcgcaggatcaggttttgctctgccagctcgttgagatcgcggcgaatagtctgcgggctaacggagaaatgctctaccagctcctcggtgctgacataaccctgctgtttaaccagttcgataataccgttgtgacgttgtgtttgtttcattgataaatccctggaattattttcgttttcgcgcattgagcgaatcaacaaaagccatcgctaaacccacggctaacccggcgatgtgtgctccgttcgccatcgacatcccaaacaaatcaaaccatccggcgacaatccagatcaacgcaaagataattaacccacgttgcaggtaaatgccactttgcggatcgcgttcgccacgtagccagacgtagcccatcagcgcatacaccacgccagaaagcccgccaaaccacggcccgctgaatttttgctgcacatagccgcttaacagggcgctaatgagagtaatgacaattagcttaccgctaccgaggcgtttttccaccgcaccgccgagataccaccaccagagcaggttaaagaggatatgcatcagcgagaagtgcattaacgcgtgggtgaagtaacgccagaactcaaacttcagcgtcggatcgaatggccaagccagccataacatcacttcctgatcgccgagaatttgcatggcgataaacaccaccacgcaggcgatcatcatcacccaggttaccggacctgcgcgttcacgcaaggcggcaaagaaaggataacggcgataatgcaggccactgccggtatggcccgcctgccagctggccgccagataacgcggatctgccgggttttcgagaaaacgcgccagctccgcccgcacgcgctcggcctgggactcatccgccagccagacatcgctttggttatgttgttgaatcgtgaggataacaccctgcgtcgccatgtaatcaacaaacgcctgcgccacgcgggggttagcaaaagaggtaatcatcaacatcgttgctgtcgcttattccacacaaaaggggacagtataaagcgttacgcgccgtacgccacctctgcgggaaactggcgctgccaggcttcaaaaccgccatcaatgctgtagaccacatcgtagccctgttgcagcagatactgcgccgcgcctttgctgctattgccgtgataacacatcaccatcaccggagtgtcaaagtcgttatcacgcataaacgcgcccagcgtgtcgttggttaaatggaaagcctgcaccgcatgccccattgcgaaactctgtggatcgcgaatatcgaccagcaccgcctctttttcctgcaacttctggtgcgcgtcggcaacgttaatacattcgaactgatccatgcgtctctctttctttacaaacaagtgggcaaatttaccgcacagtttacgtcgaagcggcagataaacgccataatgttatacatatcactctaaaatgttttttcaatgttacccaaagcgcgattctttgctaatatgttcgataacgaacatttatgaactttaacgaaagtgaatgagggcagcatggaaaccaaagatctgattgtgataggtggcggcatcaatggtgctggtatcgcggcagacgccgctggacgcggtttatccgtgctgatgctggaggcgcaggatctcgcttgcgcgacctcttccgccagttcaaaactcattcacggtggcctgcgctaccttgagcactatgaattccgcctggtcagcgaggcgctggctgaacgtgaagtgctactgaaaatggccccgcatatcgctttcccgatgcgttttcgcctgccgcatcgtccgcatctacgcccggcgtggatgattcgcattggtctgtttatgtacgatcatctgggtaaacgcaccagcctgccgggatcaaccggtttgcgttttggcgcaaactcagtgttaaaaccggaaattaagcgcggattcgaatattctgactgttgggtagacgacgcccgtctggtactcgccaacgcccagatggtggtgcgtaaaggcggtgaagtgcttactcgtactcgtgccacgtctgctcgccgcgaaaacggcctgtggattgtggaggcggaagatatcgataccggcaaaaaatatacatggcaggcgcgcggcctggttaatgctaccggcccgtgggtgaaacaatttttcgacgacgggatgcatctgccttcgccttatggcattcgcctgatcaaaggcagccatattgtggtgccgcgtgtgcatacccagaagcaagcctacattctgcaaaacgaagataaacgtattgtcttcgtgatcccgtggatggacgagttttccatcatcggcaccaccgatgtggaatacaaaggcgatccaaaagcagtgaagattgaagagagtgaaatcaattacctgttgaaagtgtataacacgcactttaaaaagcagttaaaccgggacgatatcgtctggacctactccggcgtgcgtccgctatgtgatgatgagtccgactcgccacaggccattacccgtgattacacccttgatatccatgatgaagacggcaaagccccgctgctgtcggtattcggcggtaagctgaccacctaccgcaaactggcggagcacgcgctggaaaaactgacgccatattatcagggcattggtccggcgtggacgaaagagagcgtgctgccgggtggtgccattgaaggcgaccgtgacgattacgccgcccgcctgcgccgccgttacccgttcctgactgaatcgctggcacgtcactacgcgcgcacttacggcagcaacagcgaactgctgctcggcaatgcaggggcgataagcgacctcggtgaagatttcggtcatgagttctacgaagcggagctgaaatatctggtcgaccacgaatgggtccgccgcgccgacgatgccctgtggcgtcgcacgaaacaaggcatgtggctaaatgcggatcaacaatctcgtgtgagtcagtggctggtggaatatacgcagcagaggttgtcgctggcgtcgtaaggatgatgcccggttgtgaagtgcaaccgggctatttgaattccttagactattcattgtaaataattgaataacggccccagagctaaaatcgccaaacttaagcacgttacccaatcgccccacttcttcctatggcttctatttttgctacgccactggcaataatatcccaacgcaaaaccaagctgggcactaatcgggccgacaaaatcagtccacggctgcggccaaaaaggggaaaaattcaggggaagccagacaaatgtcagaaagaaatttcggatattttccagcaacgctgatttctctggagaaatataaagaatgaaattcgagagaattaaccagaaatagaccggagaaaagaccagccagcaatgtagcctgttttttaattcaggaggcgttctgcgggagaattgccaaccgatgccacccattacactgaaaaaaagtgcatatacaaccaataactcaagttgtaattcctgaagagaaatacgcacaaccaggagcggaaaggagaatattatttccgccagaaaagttaacgtgaatataagtacggctaaggcaataaccgtcggccataccaataatggtacgataacaaaaccgagaattacagggggaatataaagccggaatttaatcatttttattttcctggtgattcggatgatgcgtcatacatcgcgcataaacactcatcaatcatccagtcgtcttcccagatctgatactgtgtgccctgttcgggctgcttaagcgggttctcaatcgcctgccgcgcgcgttctttcaggatggattgattgttgaaggcccaggcattgatttgggcggtaatggctttatcgatatcgtcctggttatctctgatataaccgtcacgatacgtattcaataaacaggcaagagacgctgccgaccaaaatccgggaactgaaataatggcatcaagcaatggcgaaagagcgatatcggcacggaaaaacatttccagcttgtactgtaattcgacagcctcatccccggatacccaatcagtcatatactggcaagcaaattgctgcaatatttcccgttcatcctcacgccagttttctttactggcaaggtttatacgccgtagagaaaatacttcgtgaatattgtcaaattgcccctgcgcaacaaactccagtaaacgaggcagaaaataacgaacctcatcgctgttttgcggatcaggtcctggactactattccaggcattgattaaggaataaggaatcgctcgcaacgatgtattccgtaatgctttttgttcctgttgactcagacaatattcacaacaaaccacaaattgcttcggcgccggataacgacgaaaaatatgatatatctgctcaattaatgcctgcatggcaggagtggggtgcataattaccccctcgcccgctgatcgcgtgtaaagggttgatagacaaaacgagcattcgccgcattcaggcgaataatggcactacgagagagggaaaagctgggccgaatgcaataattacagtcccaacagctttcctctgtgcaattttccactgagtaatgacgcgcgtagagtttcagttcagcctgcttatcgcgaaatccgcgtaaactgttatcgttttgaaattgccaggcttctttaaacacttgaaagatataaacatcctcaatccaggcgtcacattttttaagcggacgctttgctatgatcacccgctcatccgggttgagcatcgccgtaaattgtacggtgaagtcatttgtcgtgttcagatcacattgaacatctggtacatcactgatatagaggtcaaatccaaagtcagcaccacaggcacaaagacggctaatggtggcggtatcgagggaaaatcccggccatacattgctggacgttaaaccaatatttaatgtgacatcatatcgagataatccctcaagaccggcagcaccggcgaacttttccccttcatccaggacctggttaatgagttgctgaacaatgccttcatcccagtatgttgatttgcagttggcaatcgtaatatccacgccagtgaatggatcagtaccggagaggcttgcaaataacgtatcaactaattccatttttattatccggcttaatgcaacattttattcatcggcacataacctacattttccaccaggtttttcccctgtagaattaaaaatatttttttgttttacattctgttcatccctattattgcattttattttgcggtgatagctaaaccgactctgtactggctcaaaaattactgatattccactcgcaatatagccagtgcattataacgacctgccgcaggcacttttccagttgtactaacaggtaaagtcagaaaagtaacatcagcagtttgcgcagaagcagcctggttttccaccaatctgaacggaacgcctactgatgttgccagggcatttaaatctacggagttttgctgactatccataatcataataccaacatcaggattatcttgtgcctgaataatactttgtttcccattggtatcacgtgtggcggaaatgttaccgtcgaataccaacgtcattaccgcatctgtatctttattcgtacaattaatcggaatagttgttgctacaggagtaacaccagcgggcttcgctccggcaccagcccggctcaattcactggcccacacatccggcatattaacagtaaaactcgtaccctcattaatagtgcaaccttgcggaacctgaatatttaagtttcctatgtaggcattaaagacagggataggaccatgttcggtagggatctggctgacatataatgacaccaataatacgttacttaatgaaacatcagatataatttttttatcaatcctgattttaatatatccttcagtacctgatgcccaattagatggtttgcttctgtcccccggataattggtattataattttcgaatggcacaattttatctgtcattgtgccattttgattataaagttttatatgagtagagacagatatttcatgggtgagtggaataaatacatcactcccttgatgatcaccactggcaccagacggatctattccagagacagcactgaagtaaatttcataatcatcaagagaattacaataagccttataggttccaaccttccagatttgtgatggcaatacagtgccaggcgcatttttgttgacatcagaaaccactatagtaccaaaattataagaaaaggatgcaggcgtagtattattactcggtgaacccggataacaatatgcacgttctcgccccatatcttcagcattagcaatagaagaaagaacatttgaaaatataataatcaataaaatgaaatatcttctataccaataagtatgtatacgcatatcatgtcctcagatatattattgactaaatgcaaagccagtaacatccaactgtgaaggatttaattttactttcaaaattggcaatacattattataaatgtccaatgtctgccatgctatttcacaaaccccttgcgatttacaccatgattgttggcgatggctaaatggtgcgaccataccaccatctataactttaccatcaacatgtaggttatagagtgtcacatatctggggcctggattataaacggtaacaatttcattttttcgtgcccagcgtaatttttgatatgacatattcgggtcttcagacaaatttgatggccgatagaatattttcatacgattgcggactgctatttgcaattgattatcagttttgactgaatgactattttccaacgttggtaatgctgcaacattcagtataaataaactttcccggtcggcaggtaaactgccaccaacacgattaattcttatttttgtatttttgtcaggcttcaaaataaacagtggcggagttgcgataaataccgtttcagaatatgagggcaaagattcaaccgttcccgtcaactgacgagcatcatcaggggagactgcaaccttgactaacatatctctgtctgaagtgtttttgagttcaacagatattgaggactgattttccggatacgcaaaacgcgttccaccgatcactaagcctgcttgtgctgtagagaataaaagggaaaataatactatgactaccttaatcataggtgacaataaacgatactgacgcatttgcatcccctggttggacattattttttaatgctttgtaagccgcaaaaaaatgcaatatattatcaactgatgatgtaagtgaaaaaaccatgcttttaacatcattactaatactgcctttgttcttatcaaaaatcgtaagtgcaagcccctctaccgagccatcttccagcttatataaactggcatcttcagaaactgtattgccggtaaactttatatacgcgttgccaacatcactaccacagcgggttaacgttatggaaaaataaaccttttcagtaacatcccctgcactccttaccgaactactgggtacgtctggcatattaactgtaaaattttttgactcatcagaaataatgcaggttttttcggtaattaacccttcaatacgaaccactccggcatgagtgatatcatcagcaaaagaatttgttgatattataaacaaaaataaactaatgaatatcttcatatctccctcactgataatcgatatcaaaatacaacagagcatttgcttgcccggcatgtacattttcctgagttgatttatagcgaagtttaaacgtcaaattagcatcaccgttttcatttaacactaaatcacgaaaacctgattcaccattaatggcaatcgccacatcattgttatccaatatttctattcccagtccagtcgcactatctgcaccggcggagagacgcagtaatgcgctattaatggcatctgcatcaccagtaaaccgcacattggcgctcacaccagaactataaacagtactttttgcagtcgggcatccttgtacattaatcgtaaacgtttgactcggagaaacatcacctacatttaaaaattcattagcatcataagtgcccatttttaccgactgatctttacttccggtagtaatgtcacagctttttgccaacaaaatcccagtaaatgtaacaacaactgaatcattggcctgccctgagagcggaaaagcaaaaaaagcgaaaaaaataaaaaatacagaatatttagagaatattaaattcattagcggcactccagagttgcatagctaacaggattatccagttctgtttcagggagcttgtaattagcctgacatttttgctgaacaccgtctccccactggatattaataacaccttctaaaggcaatcctgagagataaagttgtccattatcgccgacaatcccggtaatttgactactgtttttaatctgagcgctggctgtagcaccgaatgggactgatttattacgataacgaactgtgaacaaaccacgaataccgatatgagcagcaaactctgcacgaactaacgcaccttttcccggaataacttcagtggaagtgatatccagttcagtatgcatattcattgacataggatctaatgaaatattattacgtctatattctgttgcataaggaacaactgcatatccacgccagtcagtggatattcctgtcccccgctgaacatccacattattcgctccaggcgcttttatcaaaacattagtttcacctaatggttgactcaacgtaagaccattttcatgtacaacaagagcaccactgatgccatagtttatttgttgattaccttcattatcgtaactgtaggcggaattcaaggaaccatatgccccacgataattaacaccaacagaaccactactgctattatcctgattagcaaaaccatgttgtatgttataactgagattatgctgctccaacagagaaccagatacccccgtatattggtttacctgtccgtggttatcctgactataaccatacgttgcagtcatggcattcgatgatgagcgcccatcattcgtggaagataaccaattacttataggtaatgagacatttagcgagacaattttatccgcatttgtccctggtgatttactgtaattccacgcaacatttagatagatacccttaatactggtgttataaccaacttggtataaagaatcttttttatcagtattccagtatgtttgctgactagccgataaatacatagacccgtagttaccgaaaggttgcgatacactagcctgaaattttccacgtttgctataacgcaagttataaaaatcattccagttataaacgtaatctttatcatctaacgtttttggatcaacaacagtccctgacatttgttggtatgtcgtatcacttaaagtgtaaaagccctgggttgaataacgatagccaataatatggaatgctgttcctgtctgaactaacgatttggaataaagaaaacgataagattgcccttgatgtttgctcccatccacaagcgaactgttagcctgagtaacatcaaacgatgttgcaccaaatacacccagattcaggccaaggccgagcgccaacgcccggtaatcctcagagaattgtgccccaccataagccgtaatatcccagggtaaaccccaaattaattccccctgaaatacataaggacttttctggttatagctattgcttcgatattggccaaccgtagtagaatattttaaatgaccttctcgttgcaggatggggacagcggcataaggtacggtatagacagtttctgaattatcagactctttgatggtaacttccagatctcccgcagatgatgtcgggttaagatcgctaatctcaaacggtcccggcggcatataggtttgataaatgacataaccattctgtttgattgttacctgagcgcgacttttcgcaattccgcgcaccgtgggagcgaaaccactttgactatcgggcaacatattttcgtcagattccagttttatgccacgaatactaacactgtcgaaaacatctgatgatgaccatgtatctcctagcgttaattcacttctgaaaggaataataacgcgctgcaacgtactactgatatgctccagtttacctgctgaattactcccacgactccaggttgaataatcgcgaaaacgccatgcaccaatattgatcccagcgcgaagatttaaataatagttatttgaagagtaatcaccacgatcgttattaccagaaaagtcataattcagcaaaaaagctgtaataccgttatcccactgttctggtggaatatatccgcgagcgtcacgttttattatcgcctgtggaaaggtcagtttaagtctctgtgcatccagctccggcatgtaatgcacatcgggaaaccagatacgcaaatcaaggcaactattttcagatgaagccaaagcctgctctggcagcgcatttttgttaattccaaggcttaataagtcagcaagtgaaaggcagggaatcagttgattctcatcgtctgctttaaaagttacagtacgagagagtaaaggggaatcattgacccaaacttcgacttcatagctaccaggaagataagtcatccctttctcgaagcgggataagtcagcaacagcttcagtatcacccgacagaaaagcagggttaaagcgcattcccgcgattgaacatgcaggcataataaccagaagaagcggcacaacccgtttcatctgcttttgtgccgccatccaatattcgcatcttttgagctttaggttcatatccctgacctgtgttgcatctgaactattccgttgttactgcattattcctttctgccgctccgtcgtagcgccaaagtcattaattgtttgataagtaatttcaccagccaacgtcactggcgacgagaccgtaatatcacttttcggtggtacaaacatattgggcaatttactcccttgtactttaattcctgtcagtgtcaggtaataaggcgaaggattgataacttttagttgtttgccctcatacttaaaccgcaacatatttcgtgcttttcctggttgcacaggtagattttccgggcgataaaatagcttgattttgttttgtaatgccaactgtaaggtattcttctgtgtatttttctcatctgttggcggaattgctttaacattcatccaatacaaagtttcacgatcggtcggcaaattagtcttaccaagaaacatgatacgtaatgaagcttctttacgcgttggtaacataaagaggggaggagtgataacaaaatcctggctctttttttccgttttactgtcatcaacccatgattgaattaaataactggtgttgtcaccgctattttgcacactgagtgttatttgcttactttctgccggataaatcaatcgcgttacgccaaggccaaacccgcccgcggacgcattattaataaataatatcgatagtaaaaaaagaatccctgagcgtataatattttgtgatacttttaattcatccctgaatccacaaacccattttttatttccaataatacatttcatacagcatccttgttgatgaaataacatctgttattcatactctattaaataatttcaatctcaggttacaactttttgtaacctgaaatcgtatttatatttactcgtacagcacaacaaaacttgctgttgacttaactacacctggtgcaacagtgctaccgttttgagcataacctgcagtaaaggccgcgctgaaatcatgggtcgtagcatttcctggaattgtataagcggcggtggaggcgctaccctctgccgcagtggtattcaggttaatcagaccattattcgtcgtacctttggagtaaattcgaatccctacaccagtcgcccccgcattgccgctgttgtcagcatccgttgatccttctacttcgttagcgagcgttttattagcgctatctgcagtaccggtaaaacggaactcaattttctgatcatctgtattgctacattcggtcagattaatattgaaatcggtctggttgctcgccccctgtgcttctacgtcgataccagtgaaaaggttggaaggcacaaccggcaggacaacttcaatctgttttgaatcggttgcgaccttacaggtagctttcactacacggccagtaaagcggattttcccccccattgaatcaacgttgtcatccatatcagtgagcctgggataatcaacggtgctccagtcagtatccgccccaccaaattgtgttgcatcgccgggtgctgcggttaccgcagtagacatcagcatacctgatgccagtaatactgcggataaattagataaattgaatttcatttatacctttccttttgttaaaaaatccaagcaacattggtgtttttacattctgcgttaataagttatatctcacaaaaaaaaataagctgacgttggctaattccagaaggttctttagaagagtaattgagtgaataatattatatatgctgcttagtaatgtacctaaaataatccaaagccgcaataagtgagtttatactcacatataacacactgataatgataaaatttatttttacgtggagttgtaagaggggcaataaaacataaatcacatgaataatattaatgcattcataataaattaatattatttgaaataacaaaataccaaaaacattatcatcaatcgttatttaatatatattaatggtatatattaaatagaataacatacatcaaagttattgtttattgtgtatagaaataccgtgagttccactctgtattacttcagcggaacacacggtatttagccgtatttgaacttacaatctcaccggatcaatatgccagatatgatcggcgtactctttgatcgtacggtcagaagagaagtagcccatattggcaatgttcagcatcgcttttgcggtccactcttcctgacgctcgtagagttcgtcgactttatcctgacaatcgacataactgcgataatccgccagtacctggtagtgatcgccgaagttgatcagcgaatcaaccagatcgcgatagcgacccggatcttccggactgaatacaccgctgccgatttgcgtcagcacctgatgcagctcctcatctttctcgtagtattcacgcggtttgtagccctgacgacgcagttcttccacttcttccgctgtgttaccaaagataaagatattgtcagcaccgacatgatccagcatctcgacattcgcaccgtccagcgtaccgatagtcagcgcgccgttaagcgcaaacttcatgttactggtgccggaagcttccgtccccgccagcgaaatctgttcagacagatcggccgccggaatgatcaactgcgccaggctaacactgtagttcgggatgaacacgactttcagcttgtcgccaatctgcggatcgttgttgatcactttcgctacgtcattgatcaaatgaataatgtgcttcgccatgtaataggccgaagccgccttaccgccaaaaatattcacgcgcggtacccacttcgcatccgggtcggccttgatgcggttatagcgggtgatcacgtgcaacacattcatcaattgacgtttgtattcgtgaatacgtttgatttgcacatcgaacagcgctttcggatttaccaccacattcagctgctgggcgatatactccgccagacgctttttgttctccagcttcgcctgatgcaccgcgtgattaaccattgggaaatcacagtgttgttgcagatcattaagcaggctaaggtcggtgcgccagttgcggcccaagtgttcgtccaacacggctgaaagcgatgggttcgctaccgccagccagcgacgcggcgtcacaccgttggtgacgttggtgaaacgacccgggaagattttcgcaaagtcggcaaatagcgattgcaccatcaggttagagtgcagctccgatacaccgttaactttgtggctcaccacaaccgccagccaggccatacgcacacgacgaccgttggattcatcaatgatcgacgcccgtcccagcagatcggtatcgttcggatactgttcctgcaaggttttcaggaaatagtcgttgatttcaaagatgatctgcaggtgacgcggcagaattttacccagcatatcgactggccaggtttccagcgcctcgctcattagcgtgtggttggtgtaggagaagacctgacaacacacttcaaacgcgtcgtcccagctaaattggtgctcatcgatttttttacattctgcgttaataagttatatctcacaaaaaaaaataagctgacgttggctaattccagaaggttctttagaagagtaattgagtgaataatattatatatgctgcttagtaatgtacctaaaataatccaaagccgcaataagtgagtttatactcacatataacacactgataatgataaaatttatttttacgtggagttgtaagaggggcaataaaacataaatcacatgaataatattaatgcattcataataaattaatattatttgaaataacaaaataccaaaaacattatcatcaatcgttatttaatatatattaatggtatatattaaatagaataacatacatcaaagttattgtttattgtgtatagaaataccgtgagttccactctgtattacttcagcggaacacacggtatttagccgtatttgaacttacaatctcaccggatcaatatgccagatatgatcggcgtactctttgatcgtacggtcagaagagaagtagcccatattggcaatgttcagcatcgcttttgcggtccactcttcctgacgctcgtagagttcgtcgactttatcctgacaatcgacataactgcgataatccgccagtacctggtagtgatcgccgaagttgatcagcgaatcaaccagatcgcgatagcgacccggatcttccggactgaatacaccgctgccgatttgcgtcagcacctgatgcagctcctcatctttctcgtagtattcacgcggtttgtagccctgacgacgcagttcttccacttcttccgctgtgttaccaaagataaagatattgtcagcaccgacatgatccagcatctcgacattcgcaccgtccagcgtaccgatagtcagcgcgccgttaagcgcaaacttcatgttactggtgccggaagcttccgtccccgccagcgaaatctgttcagacagatcggccgccggaatgatcaactgcgccaggctaacactgtagttcgggatgaacacgactttcagcttgtcgccaatctgcggatcgttgttgatcactttcgctacgtcattgatcaaatgaataatgtgcttcgccatgtaataggccgaagccgccttaccgccaaaaatattcacgcgcggtacccacttcgcatccgggtcggccttgatgcggttatagcgggtgatcacgtgcaacacattcatcaattgacgtttgtattcgtgaatacgtttgatttgcacatcgaacagcgctttcggatttaccaccacattcagctgctgggcgatatactccgccagacgctttttgttctccagcttcgcctgatgcaccgcgtgattaaccattgggaaatcacagtgttgttgcagatcattaagcaggctaaggtcggtgcgccagttgcggcccaagtgttcgtccaacacggctgaaagcgatgggttcgctaccgccagccagcgacgcggcgtcacaccgttggtgacgttggtgaaacgacccgggaagattttcgcaaagtcggcaaatagcgattgcaccatcaggttagagtgcagctccgatacaccgttaactttgtggctcaccacaaccgccagccaggccatacgcacacgacgaccgttggattcatcaatgatcgacgcccgtcccagcagatcggtatcgttcggatactgttcctgcaaggttttcaggaaatagtcgttgatttcaaagatgatctgcaggtgacgcggcagaattttacccagcatatcgactggccaggtttccagcgcctcgctcattagcgtgtggttggtgtaggagaagacctgacaacacacttcaaacgcgtcgtcccagctaaattggtgctcatcgatcagcagacgcatcatctcaggaatcgacagcaccggatgagtatcgttgaggtgaatcgcaattttatccgccaggttatcgtaggttttatgcaactgataatggcggcttaaaatgtcctgaatggtcgaggaaaccaggaagtattcctgacgcagtcgtagctcacgcccggagtaggtggagtcgtccggatacagtacgcgagatacgttctcggagtggtttttatcttccactgccgcgaagtagtcgccctggttgaatttaccgaggttaatttcgctactggcttgggcactccacaaacgcaacgtgttggtcgcgtcggtgtcgtaacctgggattatctgatcgtaagctactcccagaatctcttcggtttcaatccagcgcgtttttttaccttcctgctgaatgcgaccgccaaaacggactttatagcgcgtgttgtggcgtttgaattcccacgggttaccgtattccagccagtagtcaggcgactctttctggctaccgttaacgatgttctgcttgaacataccgtagtcatagcggatgccgtaaccgcgccccggcaaccctaacgtcgccagagaatcgaggaagcaagccgccagacggcccaggccaccgttaccgaggcccgggtcattttcttcatcaatcagctcttcgagatttaatcccatcgcttccagtgcgccctgtacatcttcgtaaattcctagcgacaacatggcgttggaaagcgtacggccaatcaaaaactccatcgacaggtagtaaacctgacgagtttcttgcgacaactgggcacggtttgagcgtaaccagcgctccacgagacgatcgcgcacagcaaataacgttgcgttcagccattcatgtttattggcgacgaccggatccttgccaatcgtaaacatcagcttgtaagcgatagagtgcttaagagcttctacgctaagcgtgggcgatgaatatgtaaacggagcattcatataggcgtttcctgaaaactatttcaagcgatagtaaagctcacggtacgacttcgccgcgacctgccagctaaaatccattgccatagcctgacgttgcacaaaccgccacagtgaaggacgggaccacagtacaaaagcacgtcgaatagcccgtaacagcgaccaggcattactatcttcaaagacaaacccactggcgacgccatctgcaaggttctcaagagaacagtcagaaaccgtatcagcaagcccaccggtgcgccgcactaacggcagcgtaccgtacttcaatccataaagttgcgttaagccgcacggttcaaaacggctgggcaccagaatgacgtccgcgccgcccataatgcgatgcgaaaatgcttcgtgatagccaatctgaacgcccacctggccggggtattccgctgccgccgcaaggaaaccttcctgcagcaccggatcgcccgcgccgagtagcgccagctgcccgccctgctccagaagaccaggtaaggcttccagcaccaggtcgagacctttctggctggtaagacggctcaccactgcaaaaagcggcactttatcgtcaaccttaagccccattgcgatttgtaactggcgcttattttccgctttatcttccaacgtatcgcgggtgtaacgcgaggccaacagtaagtccgtctctggactccagattttctcgtccacgccgttcagtacgccggaaagacgcccttcacggtgacgctgttgcaacagaccttccataccgtaggcaaactgcggttcggtgatctcgcgagcgtaggttgggctgactgccgtaatgtgatcggcatagtacagaccggccttcaggaaagagatttgtccgttgaattccagcccatgaatattaaagaatgaccatggcaattggatgtcattcatgtgatgtgcataaaacatgccttgataggccaggttgtgcacagtaaacaccgacttcgccggacgcccgcgcgccgccagatacgcaggcgcaaggcctgcatgccagtcgtgcgcatgcaccacatcaggacgccagaatgggtcaagcccgctggccatttctgccccaacccaccccagcagcgcaaaacgcaatacgttgtcggtataggcaaataagttggtatcgtgatacgggcttcccggacgatcatagagatgcggcgcgtcaatcaggtatatgccaaccccgttgtaatgaccgaacaacagcgtgatatgtccggcgaaggtatcacgacgggatactacctgcgcatcggtcacgccacggcgaatatcgggaaatgcaggcaacagtacgcgagcgtcaacgccgtctgcgatttgtgctgcgggtaatgccccaataacatcagccagaccgccggttttaagcagcgggaacatctctgaacatacatgtaaaacctgcattatcgctcctgtttatgccctaacttccgtagcatttcgcgcgttaccagcacgatgccttcttctgaacgatagaaacgacgtgcatcttcctctgcgttttcaccaatcaccatgccttccggaataacacaagcacgatcgatgacgcagcggcgcagacggcacgagcgacctacccatacttccggtaacaatacggcggaatcaatgttgcagaatgaattcacgcgaacgcgcgagaacagaacggactgcaccaccaccgaaccggagatcacacaaccgccggataccagtgagttaagggtcatcccgtggctaccggagcgatcctgcacgaatttcgctggcggtaatgattcattgtaggtgcgaattggccaattgcgatcgtacatatccagttccggcaccacagaggccagatcgaggttcgctttccagtaagcttccagcgtacccacatcgcgccagtacggctcggcatccgggtcggattgtacgcaagagagcgggaacgggtgcgcataggccagaccggcttcggtgatcttgggaatcaaatctttgccaaagtcgtggctggagttctcatcgcgatcgtcttcttccagcagttcatacagatagtcggcgtcaaagacgtaaatacccatactcgccagagatttgctcggatcgttcggcattgacggcgggttagctggtttttcaacgaattcgataattttatcgttctcatcaaccgccataacgccaaacgcggaggcttcttcaatcggtactggcatacaagcaacggtgcaacgtgcgcctttttcgacgtggtcgataagcatacgcgagtagtcttgcttgtagatatggtcgcccgccaggatcaccacgtattccgctttataacggcggataatgtcgaggttttgggtgaccgcatctgcggtgccgcgataccagttttcccctttcattctctgctgtgctggcagcagatcgacaaactcgttcatttcttcattgaagaatgaccagccgcgctggatgtgctgcaccagagtgtgggactggtactgggtgatcacgcccatacgacggatcccggagttgatgcagttagacagcgcaaagtcgataatgcggaacttaccgccgaagtgtacggccggttttgctcgcttattggttaaatccttcaggcgggtaccacgtcctcccgccagtatcagggcaacagatttcaatggcagctggcgcgccaacattaagtgatcgttcttctctaaactaaccatgactaactccttttttatcatctctggaacacacacaatccgtgtgcaggtccctgccagacagccgtaatcactgggttatcctctccagcgaatgggggaatggcgtgccactccccagcaggtaaaacaatctctgttacctcaagcgtggcgttaattgcgatcaaaaagcgatccgagagcagaatttgcagctgtttcggcccgttttgccactcatccgtgcttaaaggttgagcatatcgatttagccaacggacattgccgtcgccttcttcccaccagcgattctccatcaaagcgggaatgcgcttgcgcagatggattaacgcggcggtaaatgcggttaaaccactgcttgcctgcgaccagtccaaccaggttaattggttatcctgacagtaggcattgttattgccatgctggctgtgaccatgttcgtcaccggccagtaacatcggcgtaccctgggagagcaacaacgttgttaacagggcgtgaatgctgtcgcgccgccgttcaaccagatcaagagtaccgcctaacccttctttaccatgattgttactgtaattgttgttggtcccgtcgcgattttcttctccgtttgcttcattgtgtttatggttgaagcaaacgcagtcgcgaagcgtaaaaccgtcatgcgcggtgacgagattaatcgcggcactcggcagacgatcattacgtttaaaaacatcgctggaggcagcaaaacgcccggcaaacactcccagaggtaaatcataatgcagccagaaacgacgggctgcatcgcggaaatgatcgttccactcggcaaacagcggcgggaaatttcccacctgataaccaccaggagcgatatcccacggttcagcaattaacttcacctgcgagagcaccgggcagttctggatagcggtaaacaacggcgcatcctgacgaaactctggcgtacggcccatgactgccgccagatcaaagcggaaaccatcgacgtggcaggtttctacccaataacgcaggcaggcgctggcataatctaccaccgccggatgactcaaattgagcgtgttaccacaaccggtccagttgtgataatcgccgtcttctcttatccaataatagctacggttgtcgatcccacgcagcgagaataacgggccgtcgaggtccagttccgcactatggttgagcacgatatcaagaatgacttcgatacccgctttatgcagtgctttgattgcatcgcgaaactcatccagcgccgtttctggcgagcaggcatacgccggatgcagcgcaaacatcgccaccgggttgtacccccagtagttactaagccccatgcgttgcagacgtggttcgctggcaaattgtgccaccggcagcaactccagcgcggtaatgcccaactgtttcaaatagttgatcatcaccggatgccccagggctttataagtgccacggatctcgaccggaatctccgggtgcaggtacgttaatcctttgacatgggcttcataaatgatggtgctgccccacggcgtgcgcggcggggcatcatcttcccagtcatagtgatcaaccaccactacgcatttcggcgcaatggaggcgttgtcgcgatagtcaggttcattatgaccggcgtgcagcagcgggttatctttaaactccccgtcaatttgccgcgcgcaaggatcaatcaacaacttcgccgggttaaagcgatgcccctcggcgggttgccaggggccatgaacgcgataaccataacgcaaacccgggcgcgcatccggcagataaccgtgccaaatgtcgccactgtgccctggcaagtcatagcgatgttcctggccattggcatcaaagacacacagctctacccgctcggcatgagcggagaaaagtgtgaagttgacgccctgaccgtcgtaatgcgcgccgaggggagtgggtttgccaatggcgagttgtgtcattctgcctcccgaaccagccagatagtggccagaggtggtagcgtcaggctcagtgaatgctgacgaccgtggctggcaatctcatcgctgtgtactgcgccgccattgcctgcattactgccgtgatagtgcatggaatcggtattgaggatttcacgccatttacccggctggttaataccgaagcgataatcatgacgcggcaccggtgtaaagttactggcaacgatgatttcgttaccctctttatcgcgacgcacaaagatcagcaccgagcgttctttgtcatccaccaccagccattcaaagccgtacgggtcaaaatccagttcatgcattgctttatggtggcggtaggtgtggttcagatcgcgcaccagacgctggacaccgtggtgccagttatcgccgccttccaacagatgccagtcgaggctggcgtcatggttccactcgcggccctgggcaaattcgttccccatgaacagtagtttcttgcccgggaatgcccacatccagccgtagtaggcgcgcaggttagcgaatttctgccatgcgtcgcccggcatccggtcgagaatcgattttttaccgtggaccacttcatcatgcgacaacggcaggacgaagttttcagtgtagttgtagagcatcccgaaggtcagtttatcgtgatgatactgacgataaatcgggtcgagcttcatgtagtccagggtgtcatgcatccagccgaggttccacttgtaccagaagcccagaccgcccatatcctgcggacgagaaacgccagggaaatcggtagactcctccgccattgtcactgcaccggaaacctgctcaccaagaatacggttggtattacgcaagaattcaatcgcttcaagattctcgcgaccgccaaattcgttcgggatccactccccctctttacggctgtagtcgcgataaatcattgacgccaccgcatcgacgcgcagcgcatcaataccaaaacgttcaatccagtaaagtgcgttaccgacaaggaagttactgacttcgcggcgaccatagttgtagatcagcgtgttccagtcctgatgatagccttcgcgcggatcgctgtgttcatacaagttcgtgccatcaaattcggcaagcgcaaagtcatcggtcgggaagtggcctggcacccagtcgagaatcacgttcagaccagctgcgtgtgcggcatcaatgaaataacggaagtcgtcgcgagtaccaaaacggcgggtcggtgcatacaggccggttggctgataaccccaactgccatcgaagggatgctcgttaataggcagtagctcgagatgggtaaagcccatccatttagcataaggcaccagttgatcggccagctcgcggtagctcaaccagaaattgttgtcggtgtggcgacgccaggagccaaggtgaacttcataaatagagattggcgcatcaaactgattcgcttttttgcgctcttcagtctgcacaaccttttccggcaggctgcaaataagagacgcggtttccgggcgcatttgcgcttcgaaggcataagggtcggacttcaggcgcaagttgccattggcatcaatcatctcgtatttatagagctgaccgttatgcgccccggggataaacagttcccagattccgctctctttacgcagtcgcatcggatgacggcgaccgtcccagtagttgaattgcccaaccaccgagacccgacgggcgtttggagcccagacagaaaaacgcgtacctgtgacgccatccatagtatctgcatgcgcgcctaaggtttcatacggacgtaggtgagtaccttcagataatagccaggcatccatttcctggattagcgggccaaaacggtaaggatcatcaatcaggttttgctgaccatgccagacaacagccaactgatagcggaaaaaattcttacgtcgcggaatgacaccgctaaagaatccccgtgagtcgagacactccagttttgcgagtttgcgcccggttttcggttcaatcacccacacatcggtagcgtcgggtaaaagggcacggacttccagtcccgcggtggttttatgcatccccagtacggaaaaaggatccgcaaaatggcctgcaattagcgcgttaatcacgtctctatcgatacgatcggacatgcttgtcttcctgttttattgtgtcaccccatccaactgaatttttgacttctggttgtgacatttttttgacctgaacggcgcagcactctgtgcatcctctctgcgtcgtcctcacttcaggtaaggctgtgaatactcgtgtattccgccacccttaaagaatagccaatgctctatttaactcccggtaaatcatgaaacatctgcgcttactcctgtattacgcactagcaggggcggcatcgcgccccagatttaatgaataaagattacgccagttgacgaagcatccgacgcagcggctccgcggccccccacagcagctggtcgcccacggtaaaggctgacaggaactctggtcccatattcagcttacgcagacggcctaccggcgtggtcagcgtgccggtaacggcagctggggttagctcacgcatagtgatttcccgatcgtttggaacaactttcgcccacggattgtgcgcagccagcagttcttccacggtcggaatagacacatcttttttcaatttaatagtgaatgcctggctgtggcagcgcaatgccccgacacgcacacataaaccatctaccggaattacggaagatgtgttgaggatcttgttggtttccgcctgccctttccactcttcgcggctctgaccgttatcaagctgtttgtcgatccacggaatcaggctacccgccagcggcacgccaaagttatctaccggcagctcaccgctacgggttaaggttgtgactttgcgttcgatatcgagaatagcagaggacgggttcgcgagttcatctgccacatggccatacagatggcccatttgggttaataactcacgcatatgtcgcgcaccaccgccggaagcggcctggtaggttgcaacggacacccaatcaacaagatcattggcgaataaaccacccagcgacatcaacatcaggcttacggtacagttaccgccaacaaaagtcctgatgccattatttaatccgtcggtaatgacgtcctgattgacggggtcaagaatgatgatggcgtcatctttcatgcgcagagatgatgctgcgtcaatccagtaaccttgccatccgctttcacgaagctttggatagatttcgttggtataatcgccgccctgacaggtcacaatgatatcgagggcctttagcgcctccagatcaaaggcatcctgaagtgtgccagtggttccgccaaaagacggcgcagcctgaccaagctgagaagtagaaaagaagacagggcgaatggcgtcgaagtcgcgctcttcaaccatgcgttgcatgagaacggagccgaccataccgcgccagccgataaaaccaacatttttcataagcgttttttcctgcaaagatgtgtgctgtataaatgtgccggtctcctcctggcacatctttcaccatacaaaaagcagccaaagtcgcaagtgaaattaatcaatgatagcgaagccatcagtaatgcgacttatcctgctttgttagcacgcagaaagtccgcggcaattatcagggaatttgagttatgaatgaaatcatttctgcaacagttttattgatcctgattatggatccgctcggaaacctacctattttcatgtccgtactgaaacatactgaaccgaaaagacggcgggcaatcatggtgcgagagttgcttattgctctccttgtgatgctggtgttcctgtttgcgggcgagaaaattctggcatttcttagcctgcgggcagaaaccgtctccatttctggcggcatcattctgtttctgatcgccattaagatgattttccccagcgcttcaggaaatagcagcgggcttccggcaggtgaagagccatttatcgtgccgttggcaattccgctggtcgccgggccgactattctcgccacgctgatgttgttgtctcatcagtacccgaatcagatgggacatctggtgattgctctgctgctggcctggggcggcacctttgtcatcctgctacagtcttcgctatttttacgtctgctgggcgagaaaggggtgaacgcacttgaacgcctgatgggattgattctggtgatgatggcaactcagatgttcctcgacggcattcgaatgtggatgaaggggtaaggttcaaacaggtgttgcacacaaccagacgcggcacctgttttattacctgaactgataatgaccttcacccaatcggataacccttccctcttcttctgcgcggttcagccacacactaatttgttcgatggttaaaccagtacaagacgccagcctttcaatacttatcgattcctttgcaaggatcgccagttccgccacaaagagttgataaaaatcgacaggggtatgcgcgggcattactgcgtaatttgcgtcatcttcgtgcagcgaaaacagttctggttgagcgttacggagtgctctgtcatacatcagcccaggaacgtctggcagtctgatcgtcacattctcagcctgttcagcactccatgacgccccattttctactaatcgtgaattggctgattgcatatcctgatttggtttaacctgcatgggcagccactgatgttttaatgcctccatcgccccggttatcgttccaccggtcattcccgcacgtacaaccattgcgctttcagcaaggcaataaatatatttattccgcgccatcgcattgccgacggtgaaacgtacctctgggtaaaacggcgaaatcaacaccaggttgcctgctataagcccttcacgccatttcactaacgtactcgtttttaacaagctatcagctaatacgccaacggcagttcccccgacctccagagccgaggccattgcacattcatcaatacctcgcgcactaccagagataacgcaaatcccctgttgggccagtttcgcggccagttgttgggtatagcgcaaatcgtcagtcggagcatctcgcgagccaacaatcgccataccttccgcttgcagtaatgctttattcccgcagccaaataaaacgggaggtgcatccgttcgcaatcggtttttcaagcgaacgggataatcggcatctccgcgggttaagatccataaaccggcgcgttgccacttatctaccgccaacgccagactatgaccacgcgccagcaagccaagaatacgctcctgagaaatacgcggatcgctccagcctgtaagtttctcttgcggttgcggcaccagaagctcggcgggactgatacgttggtgcttcagccataatgcaaacttcccccattcactattactaagaggtttatactcactcgccgccgcgcgagaaaaatcgctggttagcaggagagttgcttgtgcattggctgaaagattcatcaattttttaccgaggtagaagcaagggcaagaggataaaccgtcgggcaacctgcctggcgtaacagtgctgtcagaactgtcagcgtccatgcagaatccacgatatcgtcaaccagcaacgccggacctggcatcaaaggaggggtaatcacaaacgccccgtcgagattttgacactggtgaaaacggttttgctgcattttctgcggtggattgtccacgactttttcaatggcatcaataaaaggtaagccaagtttcgccgccagtcgccgggcaaaatcaggaaccaggtcgaggtgccttaatgaaggaacgcagcatacccaggtgggttcaggatgcggattccagcgttggcgaaccatttccgcacatgcctccaccagctcatcactgaagcgccccgtttttttctcctgggctacctgctttccccacccggaatctccccaacgagaaaggattcgccccgtagatccttgtaaacccgcaggcaagttccctttaaatccgtattgcgtaaaagccccagatgccacctgtttattgagatttaatggcaggtcagcgtgtttaataaataaatttgccgcatggagtaagccgctatcaatgtcgggcgacaacagcggatgctgaagacaactgctacatttaccacaacgttcggcacttggctcatcgagtgcgcggcgcagaaattgcattttgcactctttggtcgtgatatagctttcaacgtctgccaactcactttttctctgattcatcaaatggttaattcgttcatgatcaggagaaaaactgacgatagttctgcgccataatttctcggtatacaccacaggcgatggattttcagctaccaataatttcagtgctttttctatttgcccataacgaagattcgtccgttgttcaatgcctcgtagggtaagaccgtcattctcgctaagtacgttgagtatttcatgaatttgcgcctccgcaggaaaggcgctttcacggaagaattgatgaatagcgcggtcttcaccaccacaaagcaatatgccaactgcggaatctatagcacgcccggcacgccccacctgttggtagtaaccgacaatagaccccggcatctgataatgaatgacgaaacctaaatcaggtttatcaaatcccatacctaatgccgtcgtcgcgaccagcactttgattttatttgccagcagtgcctgctccagatactccctggcagtattagaatcttccgcaccttcacaagtcacgccgctgtaataagcaaatgcactgataccatttttccttaaccactcggcgacaagttcagcatcgcgagtcgtcagggtataaacaattcccgatttggaaaactgagggataaccgttgctaaccatgccagacgggatgactgttctcctaagactaaggcatcaagcgccaaactttcgcgagccagcgttccacgctgaatcacaatgtcacccaattgctgacggatatcctcaacgacacggttattcgctgtcgcggttgtacccagaataggggtattcgcaggcagttggcgcaaaatatctaatatacgtcggtaatccgggcggaaatcgtggccccaatcagagatgcagtgcgcctcatcgaccaccagtaaaccgatgcggtcagcgactggatataaaaccgtttcaagaaaatcctgattcgccaaccgttcaggtgaaatcagcagacaatctacgccaccttgcagcaacttatcgctaatgcgctgccattcttccctgtttgtagaattcaacgtttcagccgtaatacctaaccgttcagcggcggcaacctggttacgcatcagggcaagcaaaggagagatgataattgtcgggccagcgccgtgatcgcggaagattttactggcgatgaagtacacggcacttttcccccagccggtgcgctgtacaaccagtagttttcgccgctgattaaccaccgcatctatagcttcccattgcccttccctgaaagtagcgctggtgttacttaacatccgctgtaacagcaattcagctccgtgtttctccatcatcttctccctcgtccgttaacgcagtgattagaacggataatgttccggtctttttgcgagagagatcaaaaaaatgaagacaggagaaaagagaaatgaattactgcgagcaagctcgcagtaatttgtcgcagtaattaactcaacagctggaacgcaatcatcccaacgatggcaccgacagtgccgaggatggtttccatcatggtccaggttttaagcgtttcggcttcggtcgcgccggtaaatttaccgaacaaccagaaacccgcgtcgttaacgtggctgacaacaatcgaaccaccggcaatacaaatcgacagcgccgccatttgcgcaccggagtagttcagttgttcaatgaccggcatcaccagtcccaccgccgttaaacaggcaacggtggcagaaccctgaatgatgcgcactgcagctgccagcacgaagcaggtgatggcaatcggcaggcccatgccggttaacgcttcgcccagtgccggaccgacaccagagtcaaccagcacctgtttgaacacgccgcccgcaccaatcaccagcagaatgatccccgccggttgcagcgcgtgaccgcaaatctccatcactttgtcttttggcataccctgacgcattgccagaccgtaaatcgccaccaggcaagcaaccagaatcgcggtaaacggatggccgataaactcgaaccattcgtaagcagtagagccttctggcacaaaacgcgcggcaatggttttcagccccaccagcaccagtggcaacaggatcagcgacaggctgaatccgaaggacggcattttgccttcgccgagatgcggttcgctgatgtcgtcaggaatatgcaactccacgtagcggctgatgaaattaccccacagcggcccggcaataatcattcccggaattgccgcgcacaggccaatcaggatcatccagccaaaatcggcattcatctgcgatgccagcagcattggcgctggcccaggcaccaggaacgcagccgctgccgccacgccggcgaataatgggattaccagcttcaccaggttcgtgccggtgtggcgcgccattgagaaagcaacgctaatcagcagaacaatcgccacttcaaagaacagcggtagcgcacaaaccagccccgcaaggccgatggcataatgcacgcggctgtgaccgaaggatttgagcattttgacggcaatctgatcgaccgcgccggtttcatgtaagatcttaccaaacatggctcccagggcgacaaccaccgccaggaagccgagggtgcctcccatccctttttccatcgtcgctgcgattttatcgagcggcataccagaaaaaaggccagcccccatggacaccaccattaaagccaggaaagcgtgcatacgcgccttcatgactaaaaacagcagcagtaaaacagaccctactgctgttaaaacaagcgttaatgtagtcactacttatttgccttttttaataacctcaatggtgcttgccacaacaccttccagcggttgatcaatatccaccaccagtacatcggtttcgtccgcacccggctcctgcagcgtttcaaactgcgtcaccagcatttgggttttaaagaaatggcctttgcgcgctttcaggcggctttcaatcacatcaaaatcgcctttcaggtagatgaaagagagattaggattaccttcacgcagcaagtcgcgatagtgttttttcagtgcagaacagacgatcagcgatactttattggtgcgctgcatagcaaacgcggcgtcgttcagcgcctgcaaccacggtttgcgatcgtcgtcattcagcggttcgccagacgccattttttcgatattgcagcgcggatggaggaaatcgccatcaagaaacgcggcatgaagttgatgcgccacttcactggcgaccgcagatttgccgctgcccgatacgcccatcaagacgtaaatgtggtgatcatggttagtcgtgctcaaagtggtgcccccacaatacaagaattaaaaatgttacgggtaactgttatcggtaacattgtccagccggacaatatcagaagcaatatccatccgtgccttaagtgtataagtgtgagctacttcaaatttgtaggcttaaatagatccgcccggtgacaaggtgaaacctaaatctaacattttcggtgtcacagattcgccacgaatacgcgccagcaggcgctcagcgccaatgctgcccatccgctcacgcggcgtcagcacactcgctagccgtggctccatcacctgaccaatgtcatgaccgtggaaaccggcaatcgccatatcgtcaggaactttcaaccccaaacgctgacattcaaacgccgcgccgaccgccaggtcatcattagtacagaacacgccatccagctgcggatattcccgccgcgcctggcgaatcagttcaataccggaagagtaagaagaagattgctcaaccatcacgctatacggcaccaggcctgcatccagcatcgcctgttcgtatcccttctgtttgatgatagtacgttcgtcgaggcgtgcgccgagataggcaatgtgacgatgcccgcgagcaataatggcggtggtcatctggcgtgccgcttcaaagttatcaaaaccgacggcgatatcgaggcacggcgacttactgtccatcaactccaccaccggaatccccgccacttcaatcatctttaaggtgcgtggagtgtgggtacgttcagtgaggatcaggccgtcgatattccatgagagcattgattcgaggcgttcttgctccatttccggtttataaccgtagtgcgccagcatggtttgataaccgtgcgcgtcggtgacgctttcgattccgcgtaatacttccgcgaaaacctggttggtgagagaaggtaacaggacgccaatcgcccggctggtggcgttagagagtatatcgggcgcgcgattgggaatataacccagttcatcaagagcggcggcaatcttgccgcgtagagcgacggaaacctgctccgggttgcgtaaaaaacggctgaccgtcattttggtcacgcctacacggtcagccacatcctgaagtacgggtcttttctttttcatcgtcctgaaggtacaaaagagatagattctcttagtttaacacggacgcatcagaaccttcccgattcctcaggaaggtttgtgagataaatttagactggcggtaaatcaaacagcaggatttcactgtcgctatcagcatggatggaaatcgcctgctcatcccagattgccagaccatcgctggtcgaggctttcacgccgttaatggtgacattgcctttcaccacctggatccagacgcggcgttcagcggcaatctgatgcaccgactgctcatctttcaccagcgcccaacgatacagttccatatcctgatgcactttcaatgaaccatcacgcgcatccggcgaaagcaccagttgtttgccctgcacggcatcgaagcgacgctgttcataacgcggcgtaatgccgttttcttcaggcatgatccagatctgatacagatgcagacgctcggtgctgcttgggttgtactctgagtgacgaatacccgtacccgcactcataatctggaactcgcccgccggaacctgctctttattgcccatgctgtcctgatgctcaacagtaccttccagcacgtaggtcaaaatttccatatctttatgcgggtgagtgccgaagccctgccctgcttcaatcacgtcgtcgttaatcacgcgcagcgcagagaagcccataaaattcggatcgtaatagttggcaaaagagaaagtatgccaggagtccagccagccatgatttgcatgaccgcgttcatttgctttgcgtaagtagatcatttgtattcgccccctgaatgatttcgatgggcttagtgtggacccgatccgcctgggatgatagagggtgaaaattgacccctctgttcaaaaaaattgaactattcgaggggccatcaaacttacctcgcgagagtcactgcggagggagaagcttgctcaaaaccgcgttcaaggatttccagattcgtaagaacttcagattccttgacgtaatttggcgcaccgttggtgatggtttgatacaacgcatcataaacgcgcccataatcgcccatctctggcttcatctcttctcttaccgtcacgccctcgtcattgacatactccagcacaccgaccgaatcatccgctgcgaatcctggttcgcccggcataatattagccttcaggctggtttcctgctggtcgataccgtatttaataaacgaacctttcttaccgtgaacgataaatttcggataatcgattttcaccagatggctggttttgacgatggcttttagatcgccataaaacagctgcgcttcaaaggtgtcgtccggattggctttattacgcaggctgcggatgtcataagcgacgtgatccgggcgaccgaacagagaaataatctggtccatcgtatgcacaccaaggccatagaacgcgccatcctgcggcagccccggtttggtttctgccaccgggcggtaatagtcaaaatggctttccacttcgacaatctctcccagcttgccgctttcaatcgcttttttcgctgtcaggaagcaggaatcaaagcgacgattctgatacggcgtaacgatcagccctttgcttttcgccagtgcaaacagctctttcgcctgcgcaattgtcggagtgaacggtttttcgaccagcacatttttcccggcttccagcgcgcgcttcgcgtactcgaagtggctgtccgcgtgggtgcagacgacaaccagcttaacatcgggatcgtttagcacttcgtcgagatcgctggtgaaatggatatgggaataaatgggggcctgttcttccggcttcgcatggcggcgaaaaatatgcgcgacatgccagctatccttgcggttaagtacatacggcagatggtaacgggtggtgcttttgccgaagccaataaaggcgcagttaatgaccatgatttcgtcctttttaaggtggttatttacaccttagcgcaaagcggacgtggttcctactggagtgcgcataacgaacacaagcacttcccgaggataaattgagaacgaaaggtcaaaaaaaaagccagcacccggctggctaagtaatactggaagcaatgtgagcaatgtcgtgctttcaggttctccgcgagggtcttcctgatcgcgagacaataataatcattctcattcgcacttgtccaacactttttgcaaaaaaatgcatttgactcgcatttgaaagtcaatgatgttgaaagggacatttaccccaaagaggacaaaggaatgagtgagatagtaatacgccacgcagaaacacgcgattacgaggccatcaggcagattcacgcccagccggaggtgtattacaacacgctacaggtgcctcatccttcagaacaaatgtggctggaacgactcaccgctcgccctggcatcaagcagttagtcgcctgtattgatggaatcgtcgtaggccatctcaccattgacgtgcaacaacgcccacgccgcagtcatgttgccgattttggtatctgtgtcgactcccgttggaagaaccgcggcgtcgccagcgccctgatgtgagagatgattgaaatgtgcgacaactggttgcgggtagatcgtattgagctaacggtgttcgtcgataacgcgccagcaattaaggtctataaaaaatttggctttgagattgaagggactggcaagaagtacgcgctgcgtaatggtgaatatgtcgatgcgtattatatggcgcgggtgaagtaagatagtgccctttttctgagatggaaaaagggtgtcattcaaaatcggcataccttcctttaatgtatttattttcccaataaatatatgagatttacctcataattacttcctaaagtgtaatattttattttttaatatatacgcctacaatttcctggagtaaataaataacaattaacaagcataatattgccattgataaaatagcatgccataaaaggacttttcagggatgagtaatattgtttatctgacagtaacgggagaacaacaaggaagcatctccgcaggttgtgggactactgaatctataggtaatcgctggcagagcgggcatgaggatgaaatatttacattctcactcttaaatagtattactaatacggggcttggttcacagttccatggtataacattttgtaaattaattgataaaagcactccattatttattaattccattaacaataatgaacaattatttatggaatttgacttctatcgaataaatagatttggtagatgggaaaagtattattatatacaactaagaggcgcttttttatcggctattcatcaccagatctttgaaaaccaactggatacagaaacaataactgttagttatgaatttatcctctgccaacatcttatcactaacaccgagttcagctatttggcactccctgaaaattataaccgcttgtttttaccaaattcaaaaaacaaaacaaataatggtttaaaaacgttaaacagcgaagctgttggcaggctacttgctgctggtggcgtatacaatgggaacattgaaggattcagagatactgcggaaaaactgggtggagatgcaatcaaaggctatgatcaaatactaaatgaaaaaacagcgggcatagcgatagcaacagcatctattcttttaacaaagcgttctaatgttgatacatatacagaaataaatagttacttaggcaagcttagaggccaacaaaaacttcttgatagtatagacataatagaaataatatacattaagagaccttcaaaagacttagctaacttacgaaaggagtttaataaaaatgtaagaaaaaattttcttatcaaacttgcaaaaacctccgaagcatctggaagattcaacgccgaagaccttttaagaatgagaaagggcaatgttcctctaaattataatgtacaccataaactatctctagatgatggtggtactaatgatttggaaaatttagtattaatcgaaaacgaaccatatcataaggtgtttactaacatgcaatcacgaatagctaagggaatattagtgggtgaaagcaaaatcactccctgggccattccatctggctcaatttatcctcccatgaaaaatattatggaacccacaaaatgatgactaaaacccaaataagtaaattaaaaaaaatgatgaatgatttagactatccatttgaagcaccgctcaaggaatcatttattgaaagtataatccaaataaaatttaattctaactcaactaattgcctggagaagttatgtaatgaagttagtattctctttaataatcaacctgattatcttacttttttaagagcaatggatggattcgaagttaatggattacgattatttagcctctcgattccagaaccttcagttaaaaacctttttgccgtaaatgaattttatagagataatgatgatttcataaatcctgacttacaagaacggttagtgatcggggatgatagcatttcaatatttacttatgacattaaaagtaacttttttgaaattagagataatattggcacagaaaatatattcagttcgtttagtgatttctcttcattcttaaacgaaatcatggacagttgttcataataataaaaaggtaaccaaaatcattgtaaaccatgccatctttttagagtttaccagcagtaaatttcttgatcgaaatttatcaatacaagctatagaaaaacttacaacggaactacactccttaagtgagatggaccgaagacatgtagtcgctatttaaactgaaatagctaatggcgatgatgatcttagtgacatgttgatttggttagaattttacccgaatcataagattctgatatcttaaatgagcaaatccggttcgacgttctggaaaataaatcacaaaatattagcagatacttattttgtgactataccttatccgatgaactcttttcaaaaccagcatttaataatatctttgacgaagatgaacgcgtctttgctcaatgtataacgcaggaataataatataacgctaaacaataatatttattataattatgattacttatcacgacgcattcgcgaaagcgaacaattaccttgatgatgcaaatctcccggtcgtcattactctacatggacgctttagccagggctggtatttctgtttcgaagcacgagaatttctcgaaactggagatgaggccgcgcgcttagctggtaacgcaccttttattgttgataaaggcagtggtgaaattcattctctgggaacggcaaagccactggaagaatatctacaggattatgaaataaaaaaggctaccttcggcttgccctgacaatacggccctcttcccactaagagggccgctaaccttaataccccgccgttaaatcatccaccgagcgcgggtcggatgcaccgtacagctcaccgtccggcccaatcataatgctttgtgtactgcccatcgcctctttcagcgccactttctgaccttttgcttccagcagcttgatcgtatccgggctaaaccctttttcgacacgcagctcgtccggcaaccactgatggtggaaatgcggcgcattggtcgcttcggcgacgttcattccataatcgatgctattcaccaccatttgcagcacagtggtgataatccggctaccgcctgggcttccggtgaccagccaggttttaccatccttgaccacaatggttggtgacatcgacgacagcgggcgtttattcggcccgacggcgttggcatcgccgcccaccagcccgtaaacgttcggtacgcctggttttgcggagaaatcatccatctggttattgagcaaaataccgctctcgcccgcgacaatgcccgtaccgaaggtggtgttcagcgtataggtcaccgccacggcgttaccgtctttatccactactgagtaatgggtagtttgattactctcataaggcgcaagcttgccaggacgaatttcgctggatggcttcgctttattgatatcgatttgatcggcaatagatttggcataggctttattggtcagcgcctgccacggtactttgacaaaatccgggtcgccaagatattccgagcggtcggcataggcgtatttctcagcttctgccatgatttgcatcgcgtcggcactgccaaagccgtacttctgcatatcgaagttttccagaatattgaggatttgtacgatatgaataccgccggaagatggcggtggcatggagtaaacctgatacccgcgataatcgccgcttatcggtgtgcgttcgaccgctttatatgccgctaaatcttctttgctgatcaagccaccgtttttctgcatctcctgggcaatctgttccgctatcgtgcctttgtagaattcatccgggccgttttcggcaatcatctccaggctctttgccaggttcgcctgcaccagcttgtcgccctttttcagcggttcgccctctttccagaagatagctttgctattttcgtggttcggcagcacttcactgccgtaggttttgagatcgtcagccagcgcgtcgttaacgataaaaccatcgcgtgccagtttaaacgccggttgcaccactttattcaacggcatggtgccgtatttatccagcgccaacgagaaacccgctaccgtaccgggtgtgccggaagccagatgcgaagtgagtgattttttgctgtccgggttgccctgatcatcgaggaacatatcgcgggtcgctttggcgggtgccatttcgcggaaatcgatagccgtggtattgccatttttcgagcggatcagcataaaaccaccgccgcccagattccctgcctgcggatgcgttactgccagcgcgtagcccaccgccacggcagcatcaacggcattcccgccctccttgaggatatccacccccacctgagtggcagtagcatctacagacgccaccattccctgcttagcgcgtaccggatggaagacatcttcctccacaccataagaaacaggtggcgcggctaccgtactaaaacaacttcctgtgagcagagcagcaatggccacccggcgtaaaaacgtcggttttatcatcgttattctccagagattaaggggcaaccccagctaagcctggtatataactctgaattaatcatcgttttgccgggaagcgagtaaacttaaagaatatcttcagaggaggatacgcgatgaaacgacttctgcttttgacggcactcctgccgtttgtcggctttgcacagcccattaatactctgaacaaccctaaccagccgggatatcagatccccagccagcagcggatgcaaactcaaatgcagacgcagcaaatccagcaaaaagggatgctgaaccagcaactgaaaacgcaaacgcagctgcaacagcagcatttagaaaaccagataaacaataattctcagcgggtgttgcagtcacagccgggggagcgaaatcccgcccggcagcaaatgctgcccaacaccaacggcgggatgttaaacagcaaccgtaatccggatagttcgttgaatcagcagcatattctgccggagaggagaaacggcgacatgctgaatcagcccagcacgccgcagcctgacattccgttgaaaactattgggccgtaaagttcggaccaatcacgtcaatcgcatcggtacagatgcaatccacgccccagcgcagcaactctgccgcgcgctggggtttattgacggtataaaccagaatccgtaatccggcgtctttcaactgcatcactcgcgctttatcgagtaacttatgattgagatgaagagagacgcagcccagccgcgcggtcagttctcgccagtcgtcgcgccactcatcaagcaataaaccacgcggcagttccggtgccgccagctgtgcggcttctaaagcatcaatctcaaacgatgacagcagcggcggcgtcattccggcccacagttcgcgtgccgccagcgccaccattttgcccgttaatggcccggtgccagtggtgggtttgatttcgatattcgccatcatcccgtgtttgcgacaacgttccgccacctgcgaaagcaacggcagtggctcacctttaaacgctttgctgtaccaactgcctgcatccacgcgcagtaaatcctgccagttcagatcgcccgcgacgccccagccgttgctggtgcgttcaagattgtcgtcatggagcaggaagatctcgccatctttcgataacttcgcgtcaaattcgatcatcttatgaccgtattttgccccgacgtcgattgctgccagggtgttctccggggccagtttaccgccgccacgatgggcgacgatgcggggataaggccagttactcatactcgttgtcctgtttcaccatcaaaaagatgcagctgattttccggcagatgcagccacagcgtgctgcctgccgtcgggcgctcctgatgcgccagtcgcaccaccagcttctgttcgccccaacgtccgtgcgccaggttatctgcaccgaggatctccagcgtgtccatcaccagcggcacaccaccttctgcctgcaagcttagcgctatatgttccgggcgaatgccgagggtcattttacgcccggcatactgacggtagccaccgtttagtggcagcgtaataccgccatccagttcgaaatgcgtaccttcgttattcacgcggccagccagtaggttcatcgccgggctgccgataaaactcgccacaaacaggctggcgggcttttcgtacacttcaactggcgtgccaatctgttcggcgacgccgccgttcatcaccattactcgctgggcgagcgtcatcgcctcaacctgatcgtgggtaacgtagagtgaagtcgttttcaggcgacggtgcagctgttgcagttcaagacgcatctgcacacgcaacttggcatcgaggttagagagcggctcatcaaacaggaacactgccggctcacgcacaatcgcacgccccatcgccacacgctgacgctgaccgccagatagctcacgcgggcggcgcttaagcaggccgtccagctccagaatgcgcgccgcttctttaacacgttcggcaatttgttgcttgcccatgccgcgaattttcagcccccacgccatgttctcctctacgctcatatgcggatagagcgcgtagttctggaacaccatcgcaatcccgcgatctttcggctccatttcggtgacacgcttgcggtcgatccagatatcgcccgtcgttacccgctccagtccggcaaccattcgcaataacgtcgatttcccgcagccagacggcccgaccatcacgataaattcgccatccgccacatcaagggtcagcggtttaatgacctgggttttgccatcccagcttttggttactgcctgtaatttcagtcctgccatcttatttctcactatcgaccaggccgcgcacgaaggcacgctgcatcactaaaacaatcactactggtgggatcagggttaacaacatcgccgccatcaccgagttccattccgttgtgccttcgcctgtggcgatcatccctttaatccctgccacggtggtgccgagatcaacgtcggtaataatcaacaacggccacaaatactggttccagccgtaaataaaggtaatcacaaacagcgccgccagattggttttggacagcggaaaaacgatgtcgcaaaagaaacgcattggcgacgcgccgtcgatccgcgcggcttccaccagttcatccggtagggtcataaagaactggcgaaacagaaacgtggcggtcgccgaggccatcagcggcagcgttaaacctgcgtagctgtcgagcattttcaggttggcgatgacttccaccgtcgggaagatacgcacttcaaccggcaacatcagggtgataaaaatcatccagaagaagaggttacgtagcggaaaacgaaaccagacaatggcaaatgccgagagcatcgagacggtaattttgccgagcgtaatgctgaacgccatcacaaagctgttaagcaacatccgccagaacggcgcgctattcgtgcctaccccgtttacccagatgttgtggatgttttccagcagatgtgtgccggggattagcgtcatcggtgcggcatagacttcttgtttatccagcgtcgccgcgacaaacgccacgtacagcgggaagaggatcaccgcgatcccgaggatcagcatggtatggctgaatattgtcagccacggacggttctcaatcattggtaacgtaccttgctttcaacatagcggaactgcaccaccgtcagcacgatgacgaggaacatcaacaccaccgactgcgcggcagacgaagccaaatccagtccggtaaagccttcacggtaaatcttataaatcagcgtcgtggtggcctgtactggcccgccggacgtggcggcgtcgatcaccgggaaggtgtcgaagaaggcatacaccaggttcaccaccagcaggaagaaactcaccggagcgataagcggcagcgcaatcttaaagaagcggcgaatcggccctgccccatcaatggctgcggcttcgatcaacgaacgggggatggattgcagcgcggcatagaagaacagaaagttgtagctgatttgcttccacactgaggcaaacaccaccaggaacatcgcctgaccgctgttttgcgcgtggttccagtcgtagccgaactcagcgagaaaatgggtgatcagcccgcgaccagggttaaacagaaagatccacaatacggcggcaacggcgggagccacggcatacggcagcagcatcaaggtttgatagaaacgactgccgcgcacgatgtactccaccagcgctgcgaagaacagcgataccagcaaaccgctgacggtgacaaaggtgctgaattttatcgtcgtccagaaggcgtcgagatagtagctgtcgtgaaacagcgtgacgaaattatccaggccgacaaactggctggagaaaccaaacggatcgacgctttgtagcgagtaccacaacgcttcgcccgcaggccagataaaaaagataacggtgatgatgagctgcggcgcgaccagcaaataaggcagccagcgcgagcggaacatcggacgggatgatgacattacagttaattcctgaactgtgccggatgcgcttcgcttatccggcctacacgcgatgccaggtcagataagcgaaacgcatccgacattacactgattaagacttcgtcgatttctcaaagcggcgcaataactggttcccacgctcaacggcagtatccagcgcctgctgtggtgtcttcttaccggtccacacgctctccagctcttcatccacaatcacgcggatctgcggcatgttgcccagacgcaaacctttggtgaacggcaacggtggcttgttcagcatctgacgcgtggcaatatccgctcctgggtttttctcgtaaaagccctgctcacgggtcaggtcatacgccgctttagtgattggcagatagccggttttctgatgccactcggcagcgttttctggctttgcgaggaagtcgaggaacttcgccacgccggtgtaggtttctttatctttaccctgcattacccatagactggctccgccgataatggcgttttgcggcgcgtctttcgcatcggcgtcgtaaggcatcatgcctacgccatagttaaatttggcgtactcgcgaatgttggcaagagaaccggaagaggcggtagtcatcgcgcaatcaccgttatagaacttctcggtggattcatccttacgcccaacgtagctgaaatcgcccttcttgttcatctcttcgagcatggcgatgtgtttcacctgctccggcttgttgaactcaagcaccgcgtctgtgccgtcaaagccgttgtttttgctggcaaacggcaaaccgttccaggcgctaaagttttccagttggatccatccctgccagccgctggcgtagccgcacttcataccggaggctttcagttttgcggcatagtccgccagatcctgccaggttttcggcggctgttccgggtctaatcctgctttcttgaaggcgtctttgttgtaatagagaacgggagtcgagctgttgaacggctgggagagtaagtggccggttttgctgtcggagtaatagcctgaaaccgtcggcacaaactgcgactcatcgaattgaatccctgcctctttaaatacgtcatacaccggtttaatggctttcgacgccatcatggtggcggtgccaacttcataaacctgcaaaatagccggagcgttgccggtacgaaatgcggcaatccccgcgcttaaattctgttcgtagttgcctttataggtcggtacaattttgtaatccgggttttcggcgttaaaacgttgggccagagaatccacctctttacccagttccccttccatagaatgccagaacggaatggtcgtcactgcctgcgcatttgccattaaagccagtccgagcgccagtgctgaagctgtataacgtaacggtttcattgattatctctcttgttgtaccgaatgcgcgaattcacgcgttttatgctcgcggagtaacatgacatgctcgaattacagaaaaataactattttgttacatttttaagatagtaaggtgtcagaaagatgacaaggcggtgacggcgcgggcgagggaaaatgggagatggggcacggataagcggaaaaatagaaggtctgaatcaaactctacagattactcatcgtttcatgccggatgcggcgtaaacgccttatccggcctacaagatcgtgcaaattcaatatattgcaactcacccagtaggcctgataagcgcagcgcatcaggcaattttacatttgtcacctgtctcaaaggagtcttttgactccttatcaatcaacgtgttattacccgcctaaatacgcacttctcaccgcttcattcgccagcagcgcgtcgccggtatcggagagcactacatgaccgttttccagcacgtagccgcgatccgccagctttagcgcctggttggcgttctgctcgacaaggaagatggtcatcccctgctcgcgcagttgttcgatggtgtcgaaaatttgctggatgataatcggtgccagcccgagcgatggctcatcaagcagtagcaaacgcgggttactcatcaaagcgcgaccaatcgccagcatctgctgttcaccgccagacatagtgcccgctcgctgaacacggcgctcatgcagacgcggaaacagttcatagacccactttatgcgctcctggaactggtcgcgttcggcaaaaaagccgcccatcgccaggttctcttccaccgtcatccgcgagaagacacgacgcccttccgggacaatcgctaccgcttcgcgcatgattttcgccgtctgccagtcggtaatgtctttatcatcaaacacaattcgcccgctggtggcgcgcggatcgccgcataacgtgccgagcaaggtggttttccccgccccgttcgcgccaatgagggtgacaatctcgccctgattgatatgcaggctcacctcatgcagcgcctggattttgccgtagtgggcgctgactttgtcaaaggacaacatgactttttccatcttatgcctcacctaaataggcacggatcacatccgggttattacggatctgctccggtgtaccgtttgccagcggcgtcccctgattgaccacgtaaattctgtctgaaatccccatcaccagcttcatatcatgttcaatcaacaagatagtggtgttgtgatggttacgcagttcggcaatcagctcatccagctctttcgtctctttcgggttaagacctgctgccggttcgtcgagcattaaaatctccggctgcgtcaccatacagcgggcaatctccagacgacgctggtcaccataggccaggttactcgcctgacggttggcatgttccaacaaaccaatgcgctcaagccaggtagcggcgcggtcgagcgcttcgctctgggcgcgacggaaagagggggttttcaacaggccggagaacagcccagttttcagttgctgatgctgtgccaccagcaggttttcaatcaccgtcatttcacggaacagacgtacatgctggaaggtgcgcaccacgcccatgcgggcaatttgctgccccggtaaaccttccaggtgctgatcgcgcagtaaaatggtgccgccggtgggtttatagaatccggtcaggcagttgaagaccgtggtttttccggcaccgttagggccgattaacgagacgatttcctgcgggtacagttcaagattgacgttgttcaccgccagcaggccgccgaagcgcatcatcagaccgttaacagataataatgtctgactcatgcctgctctcctttcgctgcgccgttcttcagcttgagttgcgggcgcgtcatgggcagcaagccctgcggacgccagatcatcatcagcaccatcaaaccaccaagcattaacatgctgtattcgttgaaatcacgcatcaactcgcgcgataccaccagcaaaacagccgccagaatcactgcaaattgcgagcccataccgccgagcaccactatcgccagcacaaacgccgattcggcaaaagtgaaggattccgggctgacaaagccctgacgcgcagcaaacagcgttccggcaaaaccagcaaacgcggcgctgatggtaaaggcagtcagcttgatacgacgcgggcttaagcccagcgaacggcaggcgatctcgtcttcacgcaacgcttcccacgcacggcccagcggcatccgcagcaggcggttaatgacaaacaggcttaacaccaccagcagcaacgccaccaggtagaggaagatgacgcgatcggagggatcgtatttcaggccaaagaaattactgaacgtgtcccagccgccttcgcgggcggtacggctgaactcgagtccgaagagcgtcggtttcggaatctgactgataccgttcggtccgccggtaatttcggtgttattgagcagcaatatgcgcacaatttcgccgaacccgagggtaacgatcgccagatagtcaccgcgcagacgcagcaccggaaaaccgagcaggaagcccgccgccgccgccatcaacccggcaatcggcagacaggtccagaagcccagaccgtaatagtgattgagcagcgcaaaagtgtaagcgccgatggcgtaaaagccgccgtatcccagcaccagcagaccagaaagaccaacaaccacgttcagcccgagaccgagaataatgtagatcatggtcagagtggcgatatccaccgtcccacgcgacaccataaacggccacgccaccgcaagcaccagcagcgccacgaggaacagtttctgcttcaccgtggagccatcaatcgcgggcagaataaacttcggcccggaaacgctttttagccctttctggaaagcaggccgcacaagctggaagaaaaagaccaccgccgtgccgataaacacccactgccaacggatctctgaagccgtgtcgaccaccagtttggtgccatccagctccagttgcacgcccataaagacgcccgccagcacaaagaacatagcggcagagagcagcgccattgcaatatgcatcggtttcatactttctctacctccgggcgacccagaataccggtcggcatcaccagcagcaccaggatcagcagggcgaatgagaccacatctttatattccgtactcagataggcagaagagagcgcctccgcaatccccaggatcagcccgccaatcatcgcccccggaatgctgccaatcccaccgagcaccgcagcggtaaaggctttcatcccggccataaagccgatgtaagggttaattacgccgtagaactgaccgagcagcacgcccgccactgccgccatcgccgcgccaatcacaaaggtcagcgcaatcacccggtcggtgttgatgccaagcaggctcgccattttcagatcttccgcgcaggcacggcaggcgcgccccatacgggaatagcgaatgaaaatcgtcagcgccagcatggcgaggaaagtaacaatccatatcaccgcctgcatggtggtaatagacgcagagaagttttcgctatggcccaccacccactgaccgttaaacaggctgggcagcgccacatcgcgcgaaccttcggtcaggctgacgtagttttgcaggaagatagacatgccgattgccgagatgagtgcaatcaggcgcttagagttacgcaccgggcgataggctacccgttcgatactccagccgtaggcgctggcaatgacgattgcgccgacgaatcccgccgccaccagcaaccagccggtatcaatgcccagcatcatcagtgcggcgatgatcataaaggagacgtagctgccaatcatgtaaacctcgccgtgggcgaagttgatcatgccgataatgccgtaaaccatggtgtagccgatggctatcagcgcgtaggtactgcccagcgtgacgccgttaaacatctgctgcaagaaatacaaaaactgctcagacataaggtaacctttctaaacccgcccgtttttcacgaacggtgggatgatcacttggctgccgtggatgaaccgtcggcatgccactggaagacaccaaaatcgaatcccttaagatcgcctttttcatcccagttcagcggcccaattacggtgtttgcaccgttagcttttaaatctttcaccagcgccagcggctcatcgctgccggtacgttcaagggcagttgccagagattgcaccgccgcgtaggtgatccagacatagggcccggacggatctttcttgtcggctttcagcgcatcaacgatgccctggtttgtcggatcctggtcatagcgttttggcatggtgaccaacatgccttcagcggcatcaccggcaatgttcgacagcgacgcattaccgacaccttccggccccataaactgggttttcaagccaacggaacgggcctggcgcagcatctgccccatttccgggtagtaaccgccgtagtaaacgaagtcgatgttttcttttttcaggcgggcgatcagcgcggagaaatctttctctccagcggtaatgccgtcgaagaagacgacgttggcgttagccgctttcagcccgtcctgcaccgaacgtgccagcccttcgccatactgttgtttgtcgtgaatgatggcgatgcgctggggcttcaccgtctcaagaatgtattttgccgccgttggcccctgggaagagtccagcccggcagtacgcatgatgtattgataaccgcgttgggtcagctccggattggtcgctcccggcgagatcatcagaataccttcgtcttcatagatatctgatgcaggttgggtagaggaggaacacagatgaccaataacatatttaatgccgtcgttaacgattttgttggcgaccgcaacggcttgtttcgggtcgcaggcgtcgtcatattccacgccaaccagtttatcgcccttaattccccctttggcattaatgtctttaattgcctgacgcgcgccgttaaattccatatcgccccactgggcaatcgggccggacatcgcgccgacaacggcgactttaatatcgtcagccatagcggtgtgtgaaattgtcagtgcaatcatccctgcgatgatagttttcgcattccgtttcatagtcaaaaatccccattcgtgatgttgtgttgctttgtttttatgtgttaacaaatcagactgttctttttttatactgcactgtttttacctgtctgattaagggtttagcgcagtattttgtgatgatagcgattaaaatccctatttttcagtcgattaagaacagataatattctgaatttattgatagataaacagaaaaaagcgccgttgtcagcataaaataacggtacaaagggcagaataattcactaccatttaggggattatgctggatatttttcattctctaatgttttaactttgtaattattgctgaaaaaaaattaatcacctgccaaaagaaataaaaaagagaaagcctccgattaaattatttcgctacactggttccacttttgtgatttacacgggttccccatgaagctgaccatcattcgattagaaaactttagcgaccaggaccggattgacctgcaaaagatctggccggagtattccccttcctctttacaggttgacgataactaccgtatctacgccgcgcgttttaacgagcgcctgctcgctgccgtgcgggtaaccttaagcggcaccgagggggcactggattctctacgcgtgcgggaagtcacccgacgtcgcggtgtggggcaatatctactggaagaggttttgcgtaacaatcctgacgtttcatgttggtggatggcggatgctggcgtggaagatcgcggcgtgatgacagcgtttatgcgagcactgggatttacggcacaacagggtggctgggagaagcattaatcgtcaagtttgatttcaaaagtgatattgcctgatgcgctacgcttatcaggcctacaatgtgtgctgcaatttactgatttctttgaatcttgtaggccggataaggcgtttacgccgcatccggcatgaagcaacgtactcgatattagcaatttggcggcaacccaaagttgccgattaatgattacttcgcatcagtcgccgtgccgttggcgtgccagtcaaacacaccgaactcaaagcctttcagatcgcctttctcatcccaggtcagcggccccatcaccgtatcaaccgagttcgctttcaggtatttagcgatctccgccggatcgtcagactgattcaggcccgcttgcaaagattgcagcgcggcgtaggtggtccagacgaacgcgccgcttgggtcctgttttttcgctttgatcgcgtcaacaatcggtttgttcgccggaacctgatcgtagttcttcggcttggtcaccagcagcccttctgctgattcacccgcaatgttagacagcgagacgttagccacgccttccggccccataaactgggttttcagccctgccgcacgtgcctgacgcaggatctgccccatttccgggtggtaaccgccgtagtaaacgaagtcgatattctctttcttcagacgcgccaccagcgttgagaaatctttttccccggcggtaataccatcaaagaacaccacattagcattgcctttcttcaggccgtcctgcaccgcacgcgccagaccctcgccgtattgctgtttgtcgtggacgatagcaatacgctgcggtttcactttctcaagaatatatttcgccgccgtcggcccctggtcggagtccaggccggtggtgcgcaggatcagctgatagccacgggcggtcagctccggcgcggttgccgctggggtgatcattaaaatgccttcgtcttcgtagatgtcagacgctggctgcgttgatgaagagcagaggtgaccaatcacgtatttaatgccgtcgttaacgactttgttcgccaccgcaaccgcctgtttcgggtcacaggcatcgtcatattttacgatttgcagtttgttgcctttgataccacctttagcattgatatccgcaaccgcctgctctgcgccagtaaactcctggtcaccgtactgcgccaccggaccggacattgcgcctacgacggcgactttaatatcttctgccagagccatattgctgaatgccagcgcgatacatcctgccagtaacgctttaccctttatgttcatcctgagaatccccactcttctggttattacgtgtgttgtgatgttgttgtgcagcactttatttcgttttatacgtagctacccgtgctttagcagcatactctgctaaaacataccccatttttatgatattggaatagctattttgacagtttattaacaatctgcgtggggattggcgttttgccggagggggaattgattattgtagaggcccaaaaaacaaaaaccccggactctcatccagggttctctgcttaatagcggaaattacgcttcaatggcagcgcgcaattttttcatcgcgttcttttccagctgacgcacacgctcagcggaaacaccgtaacggtcagccagttcctgcaacgtggacttgttgtcttcatccagccagcgcgcgcggatgatatcctgactacgctcgtccagaccttgcatcgcatcggtcaggcggtttgccgcctgctcttcccagttatcatcttcaataccgtcggcaaagttagatgatttatcctgcagatagagcaccggagccatcggctggctgtcggaatcgtcgtcggaagacaggtcaaaggtcatgtcctgtgccgccatacgtgattccatctcacgtacgtctttgctggttacgcccagttcacgggccaccatctcgacttcatcctggttaaaccagcccagacgctgcttggttttacgcaggttgaagaacagtttacgttgcgctttggtggtcgcaactttgacgatacgccagttacgcagaacgtattcgtggatctctgctttgatccagtgaacggcgaaggagaccaggcgcacacccacttccgggttaaaacggcgcactgctttcatcaggccgatgttaccttcctgaatcaaatccgcctgtggcaggccatagcccgcataattacgagcaatatgaacaacaaaccgcaggtgagacaggatcagcgttttagctgcttccagatcgccatggtaatgcagcttttcagccagcgcccgctcctcgtcagccgacaacatcggccacgcgttagctgcccggatgtaggaatccaggttgccaactggggctaaagctaaactttgcattttgtcagtcattcaaatcctctcaatcgatatcttctggcgcttcagtggtagcaacaactgtgccagagcttaagagcaacgaggttatcattcactgttttatcagaccgtgattttatccacaagttcaatacaacgctgtgaataaattacgcacaaaatgtgacatagagatgaaataccgggaagagacaacggggtctctttccctgctacggaacccattgcagggaaagagtataacacgcttttattattcaggcgtaaagtggcgtaaatgttgtaccgtggcaagccacgctgccacccagccaatcatcgagcataccagcagcaatagcaggcattcatcgaacgataaaccattgatatcaaacttcgttccgaaaacctgtgccacttccgcaaccgccgatgacaatcgcagcaccagaatttctgacaaaattaatgacaacaatgcgccagaaaatcccagcagtgcgccaccgtacaggaacgggcgcaggatgaaaccatccgtcgcaccaatcagtttctgcacgttaatagagtcacggcgagcaaagatgctcagacgcacactgttgccgatgacgagaaacactgctgccaccatcaacacgccgatcatcgcggaaacgcgcccgaccagcccggtcaacgccgccaggcgggcaaaccagctgtcatccatccgcacttcgtcaatgccgttaatctgcgtgatacgatcacgcagcgtattcagtgactccgtcccctgaaaatcgagtttcgggatcaccaccgccactgccggaagcgggttttcttccagcatatccagcgcaccaccaaaaccagaccagttacggaactcgcccagtgcgtcttcacgagaaagataattcactttctccacgccttgctcggcctgcaactgtgccaccacgcccgcagcggcgtcatcatccagcgttttttgcagataaacagtgatttgcggtgacggataatattgcgtcgccgcctggttaacgtttttgtacaccatataacagacgctgggcagcgtcagggagatggcgataaccatcaccgttaaaaacgtggcgaacggtttgcttttcagatcctgcaatgcgccgtggaaggcatagcgtacctgttcgttgaaaacgttggttttgcgatttaccggttttggcgaggatttcgcgcgtttcggcgcgttacgaccgccgtcgccagagccgccgaccgatttacggaagcgatccagacgcccgccaaactgccgaatgtgattgattgcatcgcgcttattcatggcccacgcctccatgcaagtgaccatcgctcagggtgagcatgcgataggaacgtcgcgaaatcaggttgatgtcgtgcgttgccatcaatacggttactccaacgcggttaaactcttcaaacagacgtaaaatgccttccgacagcgcgtcgtccaggttaccagtcggttcgtccgccagcagtaccgcgggcttgttcaccaccgcgcgggcaatgccaacacgctgttgttcaccgccggaaagctgaatagggaagttcttcgctttgtccagtagcccgactttatccagcgccgccgacacccggcgacgaatgtcatcaccgctggcaccggcgataatcagcgggatcgccacgttatcatagacagtacggtccatcagtagatggtgatcctggaaaatcatgccaatctggcggcgcagaaacggaacttcacggtttttcagacgcgtgatgtcatggccgctaaaccagattttcccggcgctgggccgctcaatcccacagatcagcttcaggagggtacttttccctgcgccggaatgaccggtcagaaacgccatctcacccggctgcatatggaacgtaacgccctgcagcgcctgtctcccaccgagataagccttgctgacatgttcaaagcgaatcattgttaatcctctcgggcaaaaagtgcctctataaagtcgtccgccttaaacggacgcaaatcctcaatacgttcgccgacaccaatgtagcggatagggataccaaactggtcagccaccgagaaaattaccccgcctttcgccgtgccgtccagtttcgttagcgtgatgccggttaagccaacggcttcgtggaacagtttggcctggcttaccgcattctgcccggtgctggcatcaatagtcagcataacttcatgcggagcttcaacgtcgagtttcttcatcacgcggacgattttcttcaactcttccatcaggtgcgatttgttttgcaggcgtccggcggtatcggcaatcaggacgtcgatgttacgcgctttagcggcctgaatggcgtcgaagataacagaagcggaatcagcaccggtatgctgggcaatcaccggaatattgttgcgctgaccccagacctgaagctgttcaaccgctgccgcacggaaagtatcgcctgccgccagcatcaccgatttaccctgctgctcaaactgacgcgccagcttaccaatcgtcgtggttttacccacaccgttgacgcccaccatcaggatcacgaacggcgttttaccttcaacattcagcggctcatcgactttcgccagaatctcgcccatctcttctttcagcaggccatagagcgcctcggcatcacgaagctgcttgcgggatgcgccttctgtcagattggtgataattttacgagtggtttccacgcccacatcggcgatcaacagctgttcttccagctcttcaaacagatcatcgtcgatttttttaccgcggaacaggctgataaatccggaaccgagattttctttggtttttaacaggctgcgtttcaggcgcgcgaagaaaccttctttggtcggtttttcctgctcctgagcgatttcttccaccggctgatcttcttctgccggagaaaccaccattaccgcctcttctgccacttcggcagccagcgcctgtgcctccggctcttcgtcggtgatttcttctttagccgcttcttcttccgccgcttcgacaatctctacggtttccgcttcggcctgccactcttctggcgaaaccgcttcggcgttgacgtcttccgacaacggcagttcttcacgttcgatagccactggctccggcgtttcttctacgaccggttccggctgtgcaacgacttccgcttcaggctgcgctttttcactttcagcaacctgttcagtaacttccacaacgtcggcagcaaaagtttccgccttggcttcagtatgcgcctgcggctgctcttcaacggcgtgttcagaagccttcacaggctcttgcgcctgaacgatttcttctacaactggttgttcattctgaacttctgtctctttttccggggtctgctctttttgaccaaagcccagccaggaaaaaaagccacgttttttttctttcgccatttgcgactacactcctcgctgttgcttcatggcacagcgttaacgctatgtacatagcagctaaaaaaatgatgaaatagtctatcacttaacttaattcacatcaccgcctgcaagtatgtgttatctggcggattgagcaatttatcatgaaaaaaccgaatcattccggcagcggccaaatccgcattattggcgggcagtggcgaggccgtaaactcccggttcctgatagtccaggtctgcgccccaccaccgaccgcgtacgcgaaacgttgtttaactggctggctccggtcattgttgacgcccaatgtctggattgcttcgccgggagcggcgcgctggggctggaagcgttatcgcgctacgctgcgggggccacgttgattgagatggatcgtgcggtttctcagcagttaattaagaatctggcgacactaaaagcaggcaatgcacgcgtggtgaacagcaacgcgatgtcattcctggcgcaaaaaggcacaccgcataatatcgtgtttgtcgatccaccgttccgccgtggcttgttagaagagacgataaatttactggaagataacggctggctggctgacgaagccctgatttatgtcgaaagcgaagtcgaaaacggtctgcccactgttccggcaaactggtcattacatcgggaaaaagtggcgggtcaggtggcttatcggctgtatcaacgcgaagcacaaggagaaagtgatgctgattaatattggtcgtttgttaatgctctgcgtttggggatttttaatcctcaacctggtgcatcccttcccacgcccgctgaatattttcgttaacgtggcgctgatttttaccgtgctgatgcatggtatgcagctggcgctattgaaatccactttaccgaaagatggcccgcagatgaccaccgccgaaaaggtgcggattttccttttcggcgtgtttgaactgctggtctggcagaagaaatttaaagttaaaaaataaccttattgttcgcctacaaagctgacaaagcgcgttcctttatagctcagcgtacctttatcacccactgtcagggcgtggtactgctgggcgtcgaggcgaaacgtctgctccattcctccgctttgcggtttgaagcttgcctcatagcgcatactggtgcctgccggagtcacttcctgctggcgcgaacggcgatcgttaatcggtttttcccgcttgttgctcaccaccaccagcttttgctggagcggtgccatatcattatcagctttttcccgtcgttgttgcataaaacgaaacgatgcggcgacgatgattaagccaatgataacaataaagaaaagaggtggtttactcatctttatccctcatcggaaaatgcggaaataagcataccctgccagttatggtgttgtcatccgtccaccctcgccactaaactggaagcaagaccgtaggcattccgcttacgaaaaaataacgaattcaaggaactaagatgctttggtcgtttatcgctgtctgtctttccgcatggctatctgtggatgcatcgtatcgtgggccaacctggcaacgctgggtgtttaaaccgttaacccttcttctcctgctgttgctggcctggcaagcgccgatgttcgacgccattagctatctggtgctggcggggctgtgtgcctcactgctgggcgatgcgctaaccctgttgccacgtcaacgtctgatgtacgccatcggcgcgtttttcctctcgcacctgctgtacaccatctatttcgccagtcagatgacgctctctttcttctggcctctgccgttggtgctgctggttctgggcgcgctgttactggcgattatctggacgcgtctggaagagtatcgttggcctatctgcacgtttatcggcatgacgctggtgatggtgtggctggcaggtgaactgtggttcttccgtccgaccgctccggcgctctctgcgtttgtcggcgcttcgttgctgtttatcagtaactttgtctggctgggtagtcactatcgccgacgcttccgtgcggataacgccattgccgcggcctgctactttgctggtcacttcctcatcgtccgctcgctgtatctctgataaaacttgactctggagtcgactccagagtgtatccttcggttaatgagaaaaaacttaaccggaggatgccatgtcgactcctgacaatcacggcaagaaagcccctcaatttgctgcgttcaaaccgctaactacggtacagaacaccaacgactgttgctgcggcggcgcatgttccagcacgccaactctctctgaaaacgtctccggcacccgctatagctggaaagtcagcggtatggactgcgccgcctgtgcgcgcaaagtggaaaatgccgtgcgccagcttgcaggcgtgaatcaggtacaggtgttgttcgccaccgaaaaactggtggtggatgccgacaatgacatccgggcacaagttgaatctgcggtgcaaaaagcgggctattccctgcgcgatgaacaggcctccgacgaaccacaagaatcacgcctgaaagagaatctgccgctgattacgcttatcgtgatgatggcaatcagttgggggctggagcagttcaatcatccgtttggtcaactggcgtttatcgcgaccacgctggttgggctgtacccaattgctcgtcaggcattacggctgatcaaatctggcagctacttcgccattgaaaccttaatgagcgtagccgctattggtgcgctgtttattggcgcaacggctgaagctgcgatggtgttgctgctgtttttgattggtgaacgactggaaggctgggccgccagtcgcgcgcgtcaaggggtcagcgcgttaatggcgctgaagccagaaaccgccacgcgtctgcgtaacggtgagcgtgaagaggtggcaataaacagcctgcggcctggcgatgtgattgaagttgcggcaggtgggcgtttgcctgccgacggtaaactgctctcaccgtttgccagttttgatgaaagtgccctgaccggagaatccattcctgtggagcgcgcgacgggcgataaagttcctgcaggcaccaccagcgtagaccgtctggtaacgctggaagtgctgtcagaaccgggtgccagcgccattgaccggattctgaaactgattgaagaagccgaagagcgccgcgcacctattgagcggtttatcgaccgtttcagccgtatttacacgccagcgattatggccgtcgccctgctggtaacgctggtgccgccgctgctgtttgccgccagctggcaggagtggatttataaagggctgacactgctgctgattggttgcccgtgtgctttagttatctccacgcccgcggcgattacctccgggctggcggcagcagcgcgtcgtggggcgttgattaaaggcggcgcggcgctggagcagctgggtcgtgttacccaggtggcgtttgataaaaccggtacgctgaccgtcggtaaaccgcgcgttaccgcgattcatccggcaacgggtattagtgaatctgaactgctgacactggcggcggcggtcgagcaaggcgcgacgcatccactggcacaggccattgtgcgcgaagcacaggttgctgaactcgccattcccaccgcccaatcacagcgggcgctggtcgggtctggcattgaagcgcaggttaacggtgagcgcgtgttgatatgcgctgccggaaaacatcctgctgatgcatttgctggtttgattaatgaactggaaagcgccgggcaaacggtagtgctggtagttcgtaatgatgacgtgctgggtgtcattgcgttgcaggataccctgcgcgccgatgctgcaactgctatcagtgaactgaacgcgctgggtgtcaaaggggtgatcctcaccggcgataatccacgcgcagcagcggcaatcgccggggaactggggctggaatttaaagcgggcctcttgccggaagataaagttaaagcggtgaccgagctgaatcaacatgcgccgctggcgatggtcggcgacggtattaacgacgcgccagcgatgaaagccgccgccattgggatcgcaatgggcagtggcacagatgtcgcactggaaaccgccgacgcggcgttgacgcataaccacctgcgcggcctggtgcaaatgattgaactggcgcgcgccactcacgcgaatattcgccagaacatcactattgcgctggggctgaaaggcgttttcctcgtcaccacgctgttagggatgaccggcctgtggctggcagtgctggcagataccggtgcgacggtgctggtaacggcgaatgcgttacggttattgcgcaggaaataaagaggctatcagtctacggtccaacaatgccggatgcggcgtgaacaccttatccggcctacacagagcatcgaactcgtaggcatgataagacgcgacagcgtcgcatcaggcattgtgcaccgtatcgccagatgcagcttgaacgccttatccggcctacaaaccggtttcaagcagcaacattgagcgcgatcggtcccctcgcctctctggggagagggtaagggaaaggcagtatcgaagcccatcttcccccatcaaccgcctttacgaatcaaataacgataaggcagtccatccgtctctttagcaaccagttcgtgttccataaaggtacaaaacccaggaatatcacgggtcgtcgccggatcgtcagcaataatcagcaacgtttcacctggctgcatattgcgcactgttttgcgcaccatcattactggttccgggcagcgcaggccaagtgcgtcgagtgtgtggtcagggctggaaaagagatcggtcattttcttctcatcacataaaaaaacggcgctagtttacgccctgtgagtccgtaagcaaaccaggttaacgattgcgtgaaaattaaccattgcattgtcaacgtaaagcagtatcatgcggcggctcgaaaaaagggtaagcacgttattatgttaaggtaacagacgtgtcgtacgtattgggttccctcaccccaatggttaatcaaaaaggtacaatatgaacgttttctcgcaaacgcaacgctataaggcgttgttctggctatcgctatttcatctgctggtgatcacctccagcaactatctggtacagctcccggtctccatttttggttttcataccacctggggcgcgtttagctttccgtttatctttctcgctactgacctgaccgtgcgtatttttggcgcgccgctggctcgtcgcatcatctttgcggtaatgatccccgcattgctgatctcctacgtcatctcatcgctgttttatatggggtcatggcaaggattcggcgcgctcgcccacttcaacctgtttgtcgcccgtatcgccaccgccagtttcatggcctacgcgctggggcagatcctcgacgtgcacgtttttaaccgcctgcgtcagagtcgtcactggtggctggcaccgacagcgtccacactgttcggtaacgtcagcgacacgctggccttcttcttcattgccttctggcgtagcccggatgcctttatggctgaacactggatggaaatcgcgctggtcgattactgtttcaaagtgttaatcagtatcgttttcttcctgccaatgtatggcgtattactcaatatgctgttgaaaagactggcagataaatccgaaatcaacgctttgcaggcgagttaaaggttcgttatcagagttgtgataagatggatgaatgagccgttatggccgtttatcgaaaggaagaagtcaatgcgcaatctggttaaatatgtcggaattggcctgctggttatggggcttgcggcctgtgatgataaagacactaacgctatggcgcagggttcggtcgcagaaagtaacgcgaccgggaatcccgtcaacctgcttgatggcaagttaagtttctcgctgccagcggatatgaccgaccagagcggtaagctgggaacgcaggccaataacatgcatgtctggtccgacgccacagggcagaaagcagtcatcgtcatcatgggcgatgatccgaaagaagatctggcggtgctggcgaagcgtctggaagatcagcaacgtagccgcgatccgcagctgcaagtggtaaccaataaagccattgagctgaaaggtcacaaaatgcagcagttagacagcattatctccgcgaaaggccagacggcgtactcttccgttattctgggtaacgtgggtaatcaactgctaaccatgcaaattacgctgccagctgacaatcagcaaaaagcacagaccaccgcagaaaacatcattaatacgctggttattcagtaagttttaagatgatgaggcggcctcaggtatttccaccggaggccgtttttttaatcgccacgtcagtaataacgcgattgcgaccagtcccgccgccgccagataaatcaccggaacgcccgcccaactcatcaccagcccagccagtggtccggtcacgccaagcgataaatccataaatacggtgtaagttgccagcgccgccccctgattttgctgcggaaccgcttttaccgccactacgcccaatgcagggaacaccagcgaaaaccccgcccccgccagtaagacgccgattttcgccatccacggcatagttgccacgccaaccagtagcaggccgattatctcaacgctaaagcaaatcatcgccacgtttaagccgccgatacggttaatgccgttagggaataacaaacgcgtaccgacaaacgcacagctaaacagcgtcagcgcgaaagccgcaccgtcccaacctttagcgtcataaaacagcgtgataaaggtggcgataacgccaaatccggcggaagccagtgccagcgccataccgtacagccagacgcgcccaagcaccgcacgaaacggcagcggtttgcctttactggcttttaccgtcggacgcgggatcgccaacaaaatggccaccagtgccacgcccataatgattaacgctaacgcctgcaatccgccccagtgataaaacacgacacctaacggcgcacccatcgccatcgccccgtaagtgacaataccgttccacgaaatcacccgcccgatatgtagcgaaccaaccacgccaacaccccacagggtcgatcccgttccggcaaaactttgtccaatcccaaggattacgcgccccaggcacagtaataacaggctgatgacgggcagactggcggttaatcctgccgtcagatatcccagaccgctcaaaaagcagccgcataaaccgaagacgacaatcttttttggtcccagtaaatcggcgtaacgtccggcatgaggacggctcagcaaggtggcaaaatattgcaggctgataaccaaccctgcccagaatgcactaaatcccattacatcatggacatagcccggtaatacagcgagcggcaacccgatggtaaggtagctggcgaagttaaacatgacaatggagacaatgcgcaaattcaggcgcaatccgtttagcgcgggttcggctacgggttcgggcatgaggatcaccacatttttacaacagtgtttcatttttaccatgtgctgacgtgaaaatcagcagtaagaatcagaatattgctggcgtgactcccgctacacttaatacaaaaagtcacaaggaagccccaatggaaacccctcaacccgataaaacgggcatgcacattctgctcaagttggcctcgctggtagtgatcctcgcgggcattcacgcagcggcagatatcattgtgcagctattactggcgctgttttttgccatcgttctcaacccgctcgtcacctggtttattcgtcggggggtacaacgccccgttgccattacgattgtggttgtggtgatgctgatcgcactcaccgcgctggtcggcgtactggcggcatcgtttaacgaatttatctctatgctgccgaggtttaataaggagctgacgcgcaaactttttaaattgcaggagatgttgccttttcttaatttgcatatgtcgccggagcgaatactgcagcggatggactcggaaaaagtggttaccttcaccacggcgctaatgaccgggctttccggggcaatggcgagcgtgcttttgctggtgatgaccgtagtttttatgctgtttgaagtgcgccacgtcccttacaaaatgcgtttcgcgttgaataatccacagattcacatcgccggactacaccgcgcacttaaaggcgtttcgcattatctggcgttaaagacgctactcagtttatggacaggcataatcgtctggctggggctggagctgatgggggtgcagtttgcgctgatgtgggcagtactggcgtttttgctcaactacgtgcccaatatcggtgcggtaatttccgccgtaccgccaatgattcaggtgctgctgtttaatggtatttacgaatgtattctggtcggcgcattgtttttagtggtccatatggtcatcggcaatattttagaaccacggatgatgggccatcgcctggggatgtccaccatggtggtatttctttcattgttaatttggggatggctgctcggcccggtagggatgctactttcggtgccattaaccagcgtgtgtaaaatctggatggaaaccaccaaaggcggcagcaaactggcgattttactggggccaggcagaccgaaaagtcggttaccgggatgaggcgacaagtgttacgatacgcactttcattttccattaaacgttggccctgatatgtatcggatagttctggggaaagtttcgaccttaagcgcagctcctctgccaccgggtttacgcgagcaagcaccgcaaggtccacgacgtgaacgctggctggcggggcgtgcattgctttcgcacacgctttccccgctaccggagatcatctatggcgaacaaggcaaacctgcattcgcgccggaaacgccgctatggttcaacttaagccatagtggtgacgatatcgccctgctgttgagcgatgaaggcgaagtcggctgcgatatcgaagtgattcgcccgcgcgccaactggcgctggctggcgaacgccgtattcagccttggggaacatgccgagatggacgccgtgcatcctgatcagcaactggaaatgttctggcgcatctggacgcgcaaagaagccatcgttaaacagcgtggcggcagcgcctggcaaatcgtcagcgtagacagcacctataactcctcgctgtcagtcagccattgtcagctagaaaatttaagcctggcgatctgcacccctaccccctttacgctcaccgccgacagtgtgcaatggatcgattcagttaactgatccgcccacccgactgcccatctattgatccagaacaggtaatcagtatgacgaatacttaaaatcgtcatacttatttccgccatctattttaatccattggggttaccatgttctctacactccgccgcactctatttgcgctgctggcttgtgcgtcttttatcgtccatgccgctgcaccagatgaaatcaccaccgcctggccggtgaatgtcgggccactaaacccgcacctttacacgcctaaccaaatgttcgcccagagcatggtttatgaaccgctggtgaaatatcaggcagacggttcggtgatcccgtggctggcaaaaagctggactcattcagaagatggtaaaacctggaccttcaccctgcgtgatgacgtgaaattctccaacggcgaaccgtttgatgcagaggcggcggcagaaaacttccgtgcagtgctcgataaccgtcaacgtcacgcctggctggagctggcaaaccagattgttgatgtcaaagcactcagcaaaaacgagctgcaaatcaccctgaaaagcgcctactatcctttcctgcaagaactggccctgccccgtcctttccgttttatcgcaccctcgcagtttaaaaaccacgaaaccatgaacggaattaaagcgccgattggcaccgggccgtgggttttacaggaatcgaaactgaatcagtacgatgtcttcgtccgtaacgaaaactactggggcgaaaagccggcgattaaaaagatcacctttaacgtgatcccggacccgactacccgcgcggtggcgtttgaaactggcgatatcgacctgctgtacggaaacgaagggttattaccgctcgataccttcgcccgctttagccagaacccggcttaccacactcaactgtcacagccgatcgaaaccgtgatgctggcgctcaataccgccaaagcccccaccaacgagctggcagtccgtgaagctcttaattacgcggtgaacaaaaaatcgctgattgataacgcgttgtatggtacccagcaggtcgccgacaccctgtttgccccttctgtgccctacgccaacctcggcctgaaaccgcgccagtacgatccgcagaaagcgaaagcgttgctggaaaaagccggttggacgctgcctgcaggcaaagacatccgcgagaaaaatggtcagccgctgcgcattgaactgtcgttcatcggcaccgatgcgttaagcaaatcgatggcggaaatcattcaggctgatatgcgccagattggcgcagatgtctcgctgattggcgaagaagagagcagtatctatgctcgtcagcgcgacggtcgttttggcatgattttccaccgcacctggggcgcgccatacgatccacacgccttcctgagttcaatgcgcgtaccgtcgcacgctgacttccaggcacagcaaggtttagccgacaagccgctgattgataaagagatcggcgaagtgctggcgacccatgacgaaacgcaacgtcaggcgctgtatcgcgacattctgacccgtctgcatgacgaggcggtttatctgcctatcagttacatctcaatgatggtggtttcaaaaccggaactgggtaacatcccctacgcgccgatcgccaccgaaatcccgttcgaacagattaaaccggtgaaaccttaatgttgcgttatgtattacgccgctttctgctgctgatcccgatggtgctcgccgcctcggtgatcatttttttgatgctgcgcctcggcaccggcgacccggcgcttgattatttgcgtttatctaacctgccgccgacgccggagatgctggcctctactcgaactatgctggggctggatcagccgctgtacgtccagtatggcacctggttgtggaaggcgctgcatcttgactttggtatctcattcgccagccaacgcccggtgctggacgatatgctgaatttcctgcccgccacgctggaacttgcaggtgcggcgctggtattaattctgctcacctccgtaccgctcggtatctgggcggcgcgccatcgcgatcgtctgccggatttcgccgtccgtttcatcgcgtttctcggcgtgtcgatgcctaacttctggctggcgtttttactggtgatggcgttttcggtgtatctgcaatggctacccgcgatgggttacggcggctggcagcacatcattttgcctgcggtatccatcgcctttatgtcgctggcgattaacgcgcgtttgctgcgcgccagtatgctggacgtcgccggtcagcgtcacgtcacctgggcacgactgcgtggtctgagcgacaaacagaccgaacgccgccatattctgcgcaatgcctcgctgccgatgatcactgccgtggggatgcacattggcgaactgattggcgggacgatgattatcgaaaacatctttgcctggccgggcgtcgggcgctatgcggtgtcggcgatttttaaccgtgactatccggtgatccagtgctttacgctgatgatggtggtggtttttgtggtctgtaatttgattgtcgatttgctcaacgccgcgctggacccgcgtattcgtcgtcatgaaggagcgcacgcgtgaactttttcctctcctcccgctggtcggttcgcctggcgctgatcattatcgccctgctggcgctgattgcgctcaccagccagtggtggctgccgtatgaccctcaggctattgatttgccgtcgcgcctgctctcgccggatgcgcagcactggctgggcaccgatcatttagggcgcgatattttctcgcggctgatggcagcgacccgcgtgtcgctcggctcggtaatggcctgcctgctgttggtgctgatattagggctgattattggcggcagcgccgggctgattggcgggcgcgttgatcaggccaccatgcgcgtcgctgatatgtttatgaccttcccaacctcgattctgtcgttctttatggtcggcgtgctcggcaccgggttgaccaatgtgattatagccatcgccctgtcgcactgggcgtggtatgcacgcatggtgcgtagcctggtgatttcactgcgccagcgcgagtttgtgctggcatcacggctttctggcgcgggccatgtgcgggtgtttattgatcatctggcaggtgcggtgatcccctcgctgctggtgctggcgacgctggatatcggtcatatgatgctacacgtcgcggggatgtccttcctcggtctcggcgtgaccgcgccgaccgccgaatggggcgtgatgattaacgacgcgcgtcagtatatctggacccagccgctgcaaatgttctggccggggctggcgctgtttatcagcgtgatggcctttaacctggtgggtgacgcactgcgcgatcatctggaccctcatctggtgacggagcacgcacactaatgccacaacagattgaactccgtaatatcgcgctacaggccgcgcagccgctggtgcacggcgtatcgttaaccctgcaacgtgggcgtgtgctggcgttagtcggcggtagtggcagcgggaagtcgctgacctgcgccgcgacgctgggcattctgcctgctggcgttcgccagacggcgggggaaattttggccgatggaaaaccggtttctccctgcgccctgcgcggcatcaaaattgccaccatcatgcagaacccgcgcagtgcctttaatccgctgcacaccatgcacacccacgcgcgtgaaacctgcctggcgctggggaaacccgccgatgacgctacgcttaccgctgccatagaagcggtggggctggaaaacgccgcgcgcgtgctgaagctctacccgttcgagatgagcggcggcatgttgcagcgcatgatgattgcgatggcggtgctgtgcgaatcaccgtttatcatcgccgatgaaccaaccaccgatctcgacgttgtagcacaggcgcgcatcctcgatctgctggaaagcattatgcaaaaacaagcaccgggaatgctgctggttacccatgatatgggcgtggtagcgcgtctggcagacgatgtggcggtaatgtctcacggtaagattgttgaacagggcgatgtagaaacgctgtttaacgtccccaaacatgcggtaacgcgcagcctggtttccgctcatctcgccctctacggtatggagctggcatcatgactttacttaacgtctccgacctttcccatcactacgcgcacggtggatttagcggcaaacatcaacaccaggcggtgctgaataacgtttccctggccctgaaaagcggtgaaaccgtcgccctgctggggcgcagcggctgcggaaaaagtaccctcgcgcggctgctggtagggttagagtcgccctcacagggaaatattagctggcgcggcgaaccgttggcgaagctcaatcgcgcgcaacgtaaagcgttccgccgtgatattcaaatggtgtttcaggactccatcagcgccgtgaatccgcgcaaaaccgtgcgcgagatcctgcgtgaaccgatgcgccacctgctatcgctgaaaaaagccgaacaactggcgcgcgccagtgaaatgctgaaggcggtcgatctcgacgacagcgtgctcgacaaacgcccaccgcagttaagcggcggccagctccagcgcgtctgcctggctcgcgcgctggcggtcgaaccgaaactgctgattctggatgaagcggtttcgaaccttgatctcgtgttacaggcgggcgtcattcgcctgctgaaaaagctgcaacaacagtttggcaccgcctgcctgttcatcacccacgacttacgcctggtggaacgcttctgtcagcgggtgatggtgatggacaacggacaaatcgtcgaaacccaggtggtgggagataaattaaccttttcctctgacgccggacgtgtgctacaaaacgcggtattacccgcattccccgtgcgccgtcgcaccacagaaaaggtttaacgcaaatgcaacgagtcaccatcacgcttgatgacgatttactggagacgctggacagtctgagccagcgtcgtggttataacaaccgttccgaggcgatccgcgatattctgcgtagcgctctggcgcaggaagccactcaacaacacggcacacaaggtttcgcggtgctgtcgtatgtgtatgaacacgaaaaacgcgacttagccagccgtattgtctccacccagcatcatcaccacgatctctcagttgctactctgcatgtgcacattaatcacgacgactgtctggaaatcgccgtgttgaaaggtgacatgggcgacgtgcagcattttgccgatgacgtcatcgcccagcgcggcgtgcggcacgggcatttgcagtgcttgccgaaggaagattaacacctaccaacgcgccgttatttcctgacggcgcagtaaacttctgacaaatatcgactcacgtcacatttttttgatcacgatttggtccctcaaaatgtgagacgcttcgatcctctttttctcccgttcacctactatacgcttgaagttgtccatgattgtccatagacaactgtaaatgttcaggtgcgcgccatgaaatcattaagtaagtcgtcacaaataccgctctatcaacaagtggtggagtggataagagaaagtatttataccggggatctggtggaagacgatcgcattccttcggaataccagattatggatatgctggaagtgagccggggaaccgttaaaaaagcggtcgcccaactggtaaaagaaggcgtgttgatacaggtccaggggaagggaacatttgtcaaaaaagagaacgtggcatatccgttaggtgaaggattattgtcattcgcggaatcgctggaaagccagaaaatacactttaccactgaagttattacgtcacggattgaaccggctaatcgttatgtggcagagaaattaagaataacgcccggtcaggatattctttaccttgagcgtttacgttcaattggtgatgaaaaagcgatgctgatagagaaccgtatcaatattgagctatgccccggcatcgtggaaatcgattttaatcaacacaatttatttccaacaatagaaagtttgtcgaaaagaaaaattcgttactcggaaagtcgctatgccgcgcgattaattggtaatgaacgcggtcattttttagatatcagtgaagatgcacccgttttgcatctggagcaattagtctttttctcccgagagttacccgttgagtttggcaacgtctggttaaaaggaaataaatattatctgggcaccgtgctgcaacggcgggaattgagttaaatacacttttttatgaggaataaaatgcaaggcatacagtttcaggaaaattatattcaacgacttccggcagggttaagcgttgaacagatcatccgtcagttagcgcaaccgttggttgctgctgagctggtggtccctgattttgccgatcacgtactgaaacgtgaagcgacgtacccaacggggctgcctaccgaaccgccgtgcgtcgccattccgcacacggaccataaacatgtcaggcacaatgcaattgccgtcggtattttgccagagccggtagagtttgccgatatgggcggcgaccctgatcccgtgcctgtcagggtgatttttttgctcgccttaagcgaaagtaacaaacaattaaatgccctgggctggattatggagatgattcaggatacgccctttatgcaagccttgcttacaatggaaacaacaaaaatacacacagtaatcttaaacaaaatgaatgaacgaggtgaaatatgagtcaaaccattttatttgtctgcgccacgggtattgccacatccacggcggtaacagaaaaagtcatggagtattgcaaagagcacggccttaacgtcaattattcccaaaccaacgttgcctctttacccggtaataccgacggcgtagcgctggttgtttcaacgactaaagtgccttatgaactcgacgtgccggtggttaacggcttacccattattaccggtattggcgaagagaaagtactggcgcaaattgtttcgatccttaaaaagtaattaataataattaatttcaacccactccatcaggcgctaacgcgaggtgcgctctcgcctgaaaaagaggtttattatgaacgatatcgcgcataccctctataatattgtgcaatatatattgggatttggtcccacggtaatgttgccgttggtgttatttattcttgctctcttttttaaagtaaaacccgctaaagccttacgttcgtcattaacggtcggcattggttttgtcggtatttatgccattttcgatattcttaccagcaatgtcgggccagcggcccaggcgatggttgaacgcaccggaattaatttaccggtggtggatttaggctggccgccgctttccgctattacatggggttcgccaattgccccgtttgttattcccctgactattctgattaacgtggcgatgctggcgttaaataaaacccgcaccgttgacgtagatatgtggaactactggcattttgcccttgccggtacgctggtttattacagcaccggcagcctgttctttggtttgctggcagcggcgattgctgcggtggtagtacttaaactcgccgactggtctgcgccactggtacaaaaatactttggcctggaagggatctctttgccgacgctctcttcggtggtgttctttccggtcggtctgttggtcgacaaaatcatcgaccatatccccggcctcaatcgtattcatatcgacccggaaaccgtacagaaaaagtttggcatcttcggcgaaccgatgatggttggcactattctgggcattctgctcggcgtaattgccggatacgatttcaaaaaagtcttgctgcttggcatcagcattggcggtgtgatgttcatcctgccacgcatggtacgcatcctgatggaaggtttattaccgctgtctgaagccattaaaaagtatctcaatgccaaataccctgaccgtgacgatctctatatcggcctggatatcgccgttgccgtaggtaacccggcgattatctccaccgccctgctgctgacgccaatctcggtctttatcgcgtttgtcctcccaggtaatgaagtcctgccgcttggtgaccttgccaacctggcggtaatggcgtcgatgattgctttagccagccgtggcaatattttccgcaccgttctggcggcgatcccggtgattattgccgacctgtggattgcgactaaaatcgcaccgtttattaccggcatggcgaaagacgttaacttcaaatttgccgaaggctccagcggccaggtttccagtttccttgatggcggtaacccgttccgcttctggctgctggaaatcttaaacggcaatatcatcgccattggtctggtgccggttatcgccctggtactgtatggcattttccgaatgacgcggagcacggtttatgcctgataacagcgcagctatcgttatcgatattggcaccaccaattgcaaagtcacctgcttttcctgcctggacgcaacgacgttgggcgcgcataaattcgtgacggcaaagcagatctccccacagggcgatgtcgatttcgatatcgacgccctctggcaggaggtccgccaggcgatagcgcaactgaacgccgcttcgccgctgccggtcaggcggataagcattgccagttttggcgagtcaggggtgtttcttgacgaacatggcgagatcctgacgccaatgctggcatggtatgaccgtcgcggtgaagagtatctggcaacgcttagcgaggcagacagtgcggcactttatgacatttgcgggttaccactgcacagcaattactctgccttcaaaatgcgttggttgctggagcattatccgctgcgcaatcgtcgcggcctgcgctggctacatgcaccggaagtgctgctctggcggctgactggcgaacagcgaacggatatcaccttagccagccgtacactgtgcctggacgtgcgcaaaggcgaatggtcagcgaaagcggcggcgttgttacacgttccctgttcagcatttgcgccattggtgcagccaggcgaacacgccggatgggtcagtgagtcgctctgtaaaacgcttgggttctcgcaatcggtcagcgtgacgctggccggacatgaccatatggtgggtgcgcgggcgttgcagatgatgccgggcgatatccttaactcgacgggcaccacggaaggcattctgcaactggatacacaaccgacgctggatgaacaggccaaacgtgacaagctggcaaacggctgttactcgcttgccaaccagttcaccctgtttgcttctctgcccgtgggcggtttcgcgctggagtggctgcgtaacacgttccggctaaccgatgaggagatcgccgtgtcgctcaatcgtgggtatgcggattatctggcggggaactggtcgcttgatgacattcccgtttttattccgcatcttcgcggttcgggttcgccctataaaaatcgccatacccgaggattattttatgggcttggcgatacgttaaatatcgatatgttaattgccagcgtctcactgggattaaccatggaatttgccaactgcttcgcctgttttaatgtgcccggcaccagcgcgttaaaagtgataggtccggcaacccataatcccctttggctgcaattaaaggcggatattttacagcgtccggttgaagcaattgcatttaacgaggcggtttctgtcggagcattattaaccgccgcaccggatattccaccgccgcaagtcaccatagcccaacgtttgttaccgaatcgggcgagataccatcaattacagcgttatcagcacaaatggaaaagctggtatcagttgaaattacagcaagaaggcgtgatgccattacatcatcgggaggagcactatgttgagtaaaaccgtggaagtcagaaacagtactggcctgcatgcacgtccggcggcctgtctggcgaaagccgccaaaaaatatagctgtaaagtgacgctgcactatgaaggtaatgatattaatgccaccagcatgatgaatattatgcgcgccggaataaaaggcggaaaaacggtggaaatacgctgcgaaggtgatgatgaaaacgaggcaatacaaactctcactaccttatttcgcgaccgcttcggtgaagctgaataattaactgatattaaaagatgaggttttcaatatgccattagttaatggacggatactgctcgaccgcattcaggaaaaacgggtattagcgggcgcatttaataccaccaatctggagacaacgatttcaattttaaacgccattgagcgttcaggattacccaacttcattcagattgcgcccaccaatgcacaactgtcgggatacgattacatttatgaaatcgtgaaacgtcacgctgataaaatggatgttccggtcagtcttcatcttgatcacgggaaaactcaggaggatgttaaacaggcggtgcgcgcgggctttacctcggtcatgattgacggtgccgcattctcttttgaagagaatatcgctttcacccaggaagctgtcgatttctgtaaatcctatggcgtaccggttgaagcggagctgggggcgattctcggcaaagaagacgatcacgtcagcgaagccgattgcaaaacggaaccggaaaaggtgaagacctttgtcgaacgcaccggttgcgacatgctggcagtttctattggtaacgttcatggcctggacgatataccgcggatcgatatccccctgctgaagcgcattgccgaagtcagcccggtgccgctggttattcacggcggctccggtatcgccccggagatattacgcagtttcgttaattatcgcgtcgctaaagtgaatatcgccagcgatctgcgcaaagcgtttatcaccgcagtcggcaaagcgtatgtgaataatcacaacgaggcgaatctggcacgggtgatggcatcagcaaaaaacgccgtcgaggaagatgtgtatagcaaaatcctgatgatgaatgaggggcatcggttgggtaagtaaatcttcgccggatgcggcgtgacgccttatccggcctacaaaaccactaaaattcaataaattgcaccaatgcgtagaccctataagcttacgcatcgggcaactgtaattacgccattgtcccaattgtcttcctgaatctcagcagtgcgatggtgaaaaacgcgccgccaattgccatcagtgtcaggaactgcggccagacgatttcgaatccggcaccacggtagaggatggcctgcgcgaggctaacaaagtgtgtcgtcggcatggtcagcataatgtcctgcaccatctgcggcatactttcgcgcggcgtggaaccaccggaaagcatttgcagcggcagcagcaccagaatcaccagcagccccagttgcggcattgaacgcgctatcgtccccataaaaatgccgattgacgtggtggcaaacaaactgagcgccacgcccagcataaacagcgggatcgagccttcaatcggtacgcccagcacgcctttcaccatcagcaccagcgataatcccgacaccaccagcaccaccagccccatcgaccagacctttgccatcatgatctcaaacggcgttatcggcatcaccagtaagtgttccaccgtgccgtgttcacgctcgcggatcagtgccgatccggtcaacacaatcgccagcatggtaatgttgttgatgatcgccatcaccccgccaaaccacgcgggatcgaggttcgggttaaagcgcatccgggtttccagcgataccaacggttcgctgttatcacggtagcgcgcgacaaagctgttcacttcaccgttgataatattctggatataaccgttgccagtgaatgcctggctcatgcgcgtggcatcgacgttcacctgaatatccggctggcgtccggcgaggacatcacgctgaaaattaggcggaatatttatcgcgaaggtataacgtccggcgtccagtccggcatccatctcatcggcggtgatcatctccggtggcaaaaaccacgggcgatagaagctgttaacgatccggttcgacaactgcgattgatccatatcggctatggcgatcggcgcgaggttcaacgatcctggcgtaacggtcgctgacgaatacaccgacaccgtaaacgagaagacaatcagcgtcagcatcgctttatcaccgagcagactgcgcaactctttgatacccagattaaaaatattgcgtaaatggcgcatcatccctcctgttttttcagcagcaggatgcttaagcccatcaccagcggtatggctatcagcaacgggataaaaagttgccacaaatcagtcagatccagcgctttcgagaacgttccgcgggcgatagtcagaaaatgactggtgggataaacctcgccgatccaacgtcctggaccttccagcgaagctaccggatcgatcatcccggaaaactgtgtcgccgggatcaacgtgataattgccgtaccgaaaatggcggcaatctggcttttcataaaggtggagatcagcagccccattccggtggcgatgatgatatacagcagcgccgccagggtgagagtcaggaaactgcctttatgcggtacgccaaacacaaacaccgacagggcgcagagcaggaaaaagttcagcatccccagcgcgatgtatggcagctgtttgccaagtaaaaattcgctacgggtggtgggggtcacgtaaaggttgataatcgaccctagctctttttcccgcaccacgctaagggcgcttagcattgacgggatcatcatcagcagaagcgggatcaccgccggaacaatcgccggcaggctttttacgtccgggttatagcgatagcgcgtctcaatattcatcagcccgctttggctggcgggtgtggactgtcggctcgccacatcctgtagccagctctggtgcatggcctgcacgtaaccttttaccgtttcggcgcggctcggcatcgcaccgtcgatccagacaccgagttccacgggcgtaccacgcgcgatatcgcgcccgaaattgggagggatctcaattgccaccgtgatatcgcccgcacgcatccgacgatcaagctcgtcataactggtgagcggtggctgttcgataaagtaacgggaaccggagagattgagcgtccacgcctggctactgacggtttgatcgcggtcaagcaccgcaaagcgcaggttttccacatccatactgatgccgtaacccattatcagcatcaggatcaccgttcccatcagcgccagcgtcgaacgtaccggatcgcgtcgcagttccagcgcttcgcggcggctgtagctaaacagacggcgcaggctgaatccctgacgtggcgcgtgggtggtgtcgtgtaccaccggcggcgcttcagcttcgttgctctgccctgccgcttcctgcaaataagcgataaatgcctcttccagactggcggctccgcgtttctcaaccagttccggcggtgtaccgctggcgagcacttttccggcgtgcatcagtgagatacggtcacaacgttccgcttcgttcataaagtgggtggagatgaagatagtcactttgtcctggcgcgagagatccaccatcaactgccagaacatatccctcgccaccggatcgacgccagaagtcggttcatcaaggattaacatctccgggcgatgaatcaccgccaccgccagcgatagccgctggcgaatgccgagcggcaatgactccggcaatacatcttcgacgtcgttgagcttaaaacgctcgctcatttcagccactcgcgcgggaatttccgcttccgggatatgaaacagacgagcatgtaactccaggttttgccgcacggtgagttcgttatagagcgaaaacgcctgcgacatatagcccacccggcgacgagtatcgatatcttttggatcaaccggttgcccgaacagccacgcctcaccttcgctggcgggcagcaatccggtaagcattttcatggtggtggatttaccacagccgttcgaaccaagaaaaccaaaaatctccccgcgtggaatgcggaaattgacgtgatcaacggcaacgaaggaaccaaaacgcatggtcagatcgcgcgcttcgatggcaatctctgcgttttcaggttgatacggtgggatcactaccgcctgatgcgcctgccgttgtgcttgcggtaacagatttataaatgcttcttccagcgtggcgctttgcgtttgctgccgcaactcttcggcgctgccagttgccagcacttctccggcattcatcgctaccagccagtcgaagcgttccgcctcttccatataggcggtggcaaccagcacgctcatattgctctgccgctggcgaatgctgtcgatcagatcccagaactgggcgcgggagagcgggtcaacccccgttgttggctcatcaagaatcaacaattccgggtcgtggattaacgcacagcacagcccaagtttttgcttcatcccgccggagagtttccctgccggacgatcgcgaaacggtgctaatccggtgctggtcagcagctcattaattcgcacttcccgctccgctttgtcgtgaccgaacaggcgggcgaaaaaatcgacgttttcatacaccgacaaggtgtggtagagatttttgcccagcccctgcggcatccaggcgatgcgcgggcagacgtcgcggcgatgcttcgggtcgcgcatatcgccgcccagcaccatcacgccgccctgctcaatgacgcgagcaccggaaatcagcgacaacaagctcgatttaccgacaccatccggtccaatcagcccgaccatgcaacgggccggaatatcgagtgtgatattgttcagcgcaacggtttttccataatgctggctcacgcccgccagttgcgcgacaggcgggacgggaaccagttccagatgcgtcattgcggcaacctcaccaccaggtcgtcaggccacggaagttcttcattcacccgcacccacgctacgcccggcaatccggttttgacatattccagatgctgctggagtaattccggtgggatacgcgctttgacacggaacatcaatttcagccgctcatcgctggtttcgacagtttttggcgtgaactgggcgacgctggcgacaaaactgatggtcgcgggaatacgcagatctggtgcagcatcaagaatcaaacgtgcttcaccgcccagtttcagcgtgcccgcctgttcggttggcagaaagaaggtcatatagacgtcgctgagatcgaccatattcagcacccgaccgcctgctgccagcacttcgcctggctcagcaacccgatactgcacgcgtccgtcacgcggggctttcagttcgctgtcatcgatatctgcggcaatgcgccgttcagtggcttgtgccgcttcgacgcgagtttgcgcctgaatgatattggtgcgtgccgcctctatagcggctttagaagcagaaacctgagcttttgccgattccagcgcagctcgggcgctctcagcggcggcgcggtcgtcatccagctgttgcgcagaaattgccccccgttgtgccagtgagcgggaacgcgtatgacgttttgctacggagtccagttctgcctggcgttgattaaccagcgactgtgcggcacgagtttcgctttggcgttgctccagcaaagcctgcgcggcggcaacggcactttgtgcttctttgatttgcgcgatggcttccagtcgctgttcctgcaacacgcgagtatccatcttcgccagcacttcaccttctcgaacaaactggccttctttcaccagaatggtgtcgatacgcccggcaattttgctggcgatatccacttccgtcgcttcaatgcgcccattgctgacagcaaagccttccggcacacccgccgggcgcaacagccaccacgccacgacggcagccaccgccagtgccccgacaacccaccacgccagatggcgcttactcttatccataatcgacccgccataatccctgtaagcaatcgacgcgtgttacaactgccaccgaacgatgttcagcggattcttccatccgggataagaaggaaatggcaaatacgaccagcgcacagagcattgagcgccaatggggaaggcttagtgaaaacgggtagtaatgttgtcatcatcagcattcctggccgtaaatgaaacacgcatactcataagtgaaatcaattaaatactaacagttatattcatgttgtctatttgattgccatcaacttgtgatacatcgcgatgttcttccgttcgctggtgttttttccaaaaatattctgtacaggttcacagattctgttgcacaggtttccgtaacagggaaacctgatgactatcacatagcgttattatcgcctgatatgcgaataaataccgaatataaaataatttattctgaaaagatgatagatgataaaggctcgtgggtttaataaaatatttcctaaaagactcatttaaaacaacaaaataagataaagatattaattcagagtttatcttaggataaatatttatttaatagcattaactcaccgctaaaagttgatccccataacgctaaatccgattatagtgaagttactttttttaattgatggcatcttatagacatatttaactaactgaaaagacgaatcatatgtttttcgaagtgtagcagaaaatatatatggggtttaaaatgaatatatatatcggatggttgtttaaattaattcctttactgatgggtataatatgcatcgcattaggtgagtttgtattaaccggttctgggcaaagtgaatatttcgttgcagggcatgttctgatttctctttctgcgatatgtctggcattgttcactaccgcatttattattatatctcagttaactcacggcatgaataaattctacaacaggttatttcctgttattggttatgccggttctgctacaactatgatttggggatggtcactgttggcaagcaataatgtgatggcagatgaatttgtcgccggtcatgttattttcggcgttggcatgattgccgcttgtgtatcaaccgtagcggcatcttccggacattttctgttgatccccaaaaacgcctcgggcagtaagagtgacggtacgccattgcaggcctattcttcaacaatcggtgattgcttaattgccgttcccgttctgcttactctctttggtttcatttggtcagtcgtactgttacgtagtgcagatatcacaccacattatgttgcaggtcacgtactaatggggttaacggcaatttgcgcttgtcttattggccttgtcgccactattgtccatcaaacgcggaatacgttctcagtgaaagaacattggctgtggtgctattgggttattttgcttggctcacttaccattatttttggtatctacgtattaatcagttcagatgcaagcgcccgcctggcccccggcattattctcatttgcctggggatgatctgctacagtattttctccaaagtgtggttgttagcgctggtatggcgacgcacatgttcgttagccaacagaatacccatgattccggtatttacctgtctgttttgtctgttccttgctgcgttcctggctgaaattgcgcaaaccgatatggcttactttattccttcgcgagttctggtgggcttaggtgcagtttgttttacactgttttccatcgtttctatattagaagcgggttcagcgaaaaaataataaaaaaggcttcagataaggcgttgggcgccttatctggttttattcaggttaatccctctggtatcgagagcgcattttgcttcttattctgccaccaaatcctgcgcacaagcccatgcactcgaccacgcccactggaagttatagccccccagccagccggtgacgtccatcacttcgccgatgaagtacagcccaggcactttgcgcgcttccatcgtccgtgaagagagttcgttggtgtccacgccgccgagcgtcacttcggcagtgcgatagccttcagtgccgttgggttgtacgcgccagtcagtcaatgtgctaatcagtgtctgttggtcacgcacgttgagctgttttagcgagacatccgggatttgcccgagttgttgtaaccgttcaaccaaccgcttcggcagatgaaccgccagcgtgtttttcaggctttgattcggatgtgcattacgctgctcattcaggaaggtttcgaggtccacatccggtagcagattgatgctgacaaattcacccggttgccagtagctggaaatctgcaacaccgccggtccagataagccgcggtgggtgaagagtaagttctcacggaaaacggtaccgttttcagcggtaatcacggaaggcaccgccacgcccgccagcacctgtaactcttcaagcaacggtttatgcagagtgaatggcaccagacccgcacgggtcggcagcacgttgaggccgaattgttcggcaatcttataaccaaacggcgatgcgcccagccccggcattgacagtccaccggtcgcaatgaccagcttttcgcaaccgacagtcatgccgttcagttcaagcgtgaagcctgtatcatccttcgccacgctcagcacttcgctacgcaatctgaaggccacattgcccttctcgcactcatccaccagcatgtcgacaatctgctgcgcggagtcatcgcagaagagctgccctaacgttttctcgtgccaggcgatgccgtgtttattgaccagatcaatgaaatcccactgggtaaaacgcgcgagtgcagacttacaaaaatgcggattctggctcagataagcgcccggtccgacataaaggttggtaaagttgcagcgcccaccgccagacatgaggattttgcgccctggttttttaccattatcgatcagcagaacccggcgtcctgcctgacctgccagcgcagaacagaacatacctgccgcaccagcgcctataataatggcatcaaacctttccacgttgcgctcctctaagaaaaaacgggcgtgaattgtaaagattcctcagtggtcgcaccagcatcaatattactaaaaggaagtatttgcctgaattatataagataattattttttgagtgtaatccatacaggaggcaaatcaaaaaaagtctatatttcactttgcccgcgccgcgaaagtcactgataatgcgccgcgttcatgtcctcaaaatggcgtaacgtcctatgctacatttgtttgctggcctggatttgcataccgggctgttattattgcttgcactggcttttgtgctgttctacgaagccatcaatggtttccatgacacagccaacgccgtggcaaccgttatctatacccgcgcgatgcgttctcagctcgccgtggttatggcggcggtgttcaactttttgggtgttttgctgggtggtctgagtgttgcctatgccattgtgcatatgctgccgacggatctgctgcttaatatgggatcgtctcatggccttgccatggtgttctctatgttgctggcggcgattatctggaacctgggtacctggtactttggtttacctgcatccagctctcatacgctgattggcgcgatcatcgggattggtttaaccaatgcgttgatgaccgggacgtcagtggtggatgcactcaatatcccgaaagtattaagtattttcggttccctgatcgtttcccctattgtcggcctggtgtttgctggcggtctgattttcttgctgcgtcgctactggagcggcaccaagaaacgcgcccgtatccacctgaccccagcggagcgtgaaaagaaagacggcaagaaaaagccgccgttctggacgcgtattgcgctgatcctttccgctatcggcgtggcgttttcgcatggcgcgaacgatggtcagaaaggcattggtctggttatgttggtattgattggtgtcgcaccagcaggcttcgtggtgaacatgaatgccactggctacgaaatcacccgtacccgtgatgccatcaacaacgtcgaagcttactttgagcagcatcctgcgctgctgaaacaagcgaccggtgctgatcagttagtaccggctccggaagctggcgcaacgcaacccgcggagttccattgccatccgtcgaataccattaacgcgctcaaccgcctgaaaggcatgttgactaccgatgtggaaagctacgacaagctgtcgcttgatcaacgtagccagatgcgccgcattatgctgtgcgtttctgacactatcgacaaagtggtgaagatgcctggcgtgagtgctgacgatcagcgcctgttgaagaaactgaagtccgacatgcttagcaccatcgagtatgcgccggtgtggatcatcatggcggtcgcgctggcgttaggtatcggtacgatgattggctggcgtcgtgtggcaacgactatcggtgagaaaatcggtaagaaaggcatgacctacgctcaggggatgtctgcccagatgacggcggcagtgtctatcggcctggcaagttataccgggatgccggtttccactactcacgtactctcctcttctgtcgcggggacgatggtggtagatggcggcggcttacagcgtaaaaccgtaaccagtattctgatggcctgggtgtttacccttccggctgcggtactgctttccggcgggctgtactggctctccttgcagttcctgtaatcgtacgcaccaaaacgagcgggtcagtttactggcccgctttttttatgcgtcattattgctgaagtgcttaatgccaaatcatcaatgcaatcaggctgaccaccaccagaccacacaatgcgctggtcagaataaactgccgacgcacccgctcacagcggcgaataaactcatcatcgtgatgatcgcgataacgttgggcatagatataccaaacgagacgcacctgtttgttgggttggccatgtgaggtaaaaaagccccctccatcaacatattgatagagcaatggatcgcagttacgcagtaccactaacaacgcgcgtagtgatgagaaatagcgcgccatgttaacaatgcaaacgacacataaagcccaaaataatgcgacggtgcttatcatacctcctccccggcgacctgcccgcggagttccaccccggggctaccgctcccgatacgctgccaatcagttaacaccaggtcctggagaaaccgcttttgtggtgaccaacatccgagcggctctatagatagtgtaggagatcaggttgttttttttccagaaggttaaccactatcaatatattcatgtcgaaaatttgtttatctaacgagtaagcaaggcggattgacggatcatccgggtcgctataaggtaaggatggtcttaacactgaatctttacggctgggttagccccgcgcacgtagttcgcaggacgcgggtgacgtaacggcacaagaaacgctagctggccagtcatcgacaactttatggaaggagtaacactatggcttataaacacattctcatcgcggtcgacctctccccggaaagcaaagttctggtagagaaagcagtctctatggctcgcccctacaatgcgaaagtttctctgatccacgtagatgtaaactactctgacctatacaccgggcttatcgatgtgaatctgggtgatatgcagaaacgcatctctgaagagacacatcatgcgctgaccgagctttcaaccaatgcaggctacccaatcactgaaaccctgagcggcagcggcgatctgggccaggtactggtcgatgcaatcaagaaatacgatatggatctggtggtttgtggtcaccaccaggacttctggagcaaactgatgtcttccgcacgtcagctgatcaacaccgttcacgttgatatgctgattgttccgctgcgcgacgaagaagaataatcttccctccacgacgtgttcctgaacgcccgcatatgcgggcgttttgctttttggcgcgccttgttacctgatgcagcgtaaacgccttatctggcctgcggtctgcgtactcaatcaaaacccctgccaatacaacatttaacaccatcatattttctatcattagtgtgatcagctggttattttctgttgtaatagtgtattaatctattcgccgcatcaatattaagaatctctgacagatataaactttttcgcgcgttatcccttacgcgttcatacttttcaggatggtattggaaggttaataaatatgaatacaacaacacccatggggatgctgcagcaacctcgcccatttttcatgatcttttttgtcgagttatgggagcgattcggctactacggcgtgcagggcgtactggcggttttcttcgttaaacagcttgggttctcgcaagagcaggcttttgtcacttttggtgcttttgctgcgctggtctatggcctcatttccattggtggctatgttggcgaccacctgctgggaaccaaacgcaccattgttctcggagcacttgtgctggcgattggctacttcatgaccggcatgtcgctacttaagcctgacctgattttcatcgccctggggactatcgctgtcggtaacggcctgtttaaagctaacccagccagcttgctttcgaagtgctacccgccgaaagatccgcggcttgatggcgcattcaccctgttctatatgtcgatcaatatcggctcgttgatagcgttatcgctggcccctgtgatcgctgataaattcggctattcagtcacctacaacctgtgcggtgcggggttaattatcgcattactggtttacatcgcctgtcgtggaatggtgaaagacattggttctgaacccgacttccggccgatgagcttcagtaaactgttgtacgtattacttggcagcgtggtgatgatcttcgtctgcgcctggctgatgcacaacgtagaagtcgccaatctggttctgattgttctctccatcgtcgtcaccatcatcttctttcgtcaggcattcaagctggataaaaccgggcgcaataaaatgtttgtcgcctttgtcctgatgctcgaagcggtggtgttttacattctctacgcccagatgccaacgtcgctgaacttctttgccatcaacaacgtgcatcatgaaattctcggcttttccatcaacccggtcagcttccaggcgcttaacccgttctgggtggtactcgccagcccaatactggcaggcatttacacgcatctgggtaacaaaggcaaagatctctcgatgccgatgaagtttactctcggcatgtttatgtgctcactgggctttttgacggctgcagcggctggaatgtggtttgcggatgcccaggggctgacatcgccatggtttatcgtgctggtgtacttattccagagcttaggtgaactgtttattagcgcccttggcctggcgatgattgctgccctggtgccgcagcatttgatgggctttattctcgggatgtggttcctgacgcaggctgccgcgttcttgctgggcggctatgtggcaacatttaccgcagtaccagacaacattaccgatccacttgagacgttgcccgtctataccaacgtgtttggtaagattggcctggttacgctgggcgttgcagtagtgatgctattgatggtgccgtggctgaaacgcatgattgcgacgccggaaagccattaattattcttgcagaaagcggggtagcgttatcgctaccccgctttacttttacaccggcgttccggcgtaaatatcaaagcgatgccctttagtgactaccgcgtttggcgtggcgacattcgccagcggcggcgcatagtccggacgcttcaccaccacgcgtttggttgccagcaaccgcgcaggctccaacaatccatcggcatcaagatccggccccaccagcgactgaaacacgcgcatctcttttttcaccagcgcgcttttctgcttatgcgggaacattgggtcaagataaactacctgcggacgcggggtgatatcgctcagcgccgtcagactggaggcgtgaatcaactgcaaacgttcctgtaaccagccgccgatttccgcatccgcataaccacgcgccaggccatcgtcgagcagcgcggcaaccactggattacgctccagcatccgcacgcggcagccgaccgaagccagcacaaaggcatcgcgccctaatcctgcggtggcgtccaccacatccggcaaataatcgcctttaatgcccaccgctttcgccaccgcctctccgcgaccaccgccgaatttgcgtcggtgcgccatcgccccgccaacaaaatcaacaaagatgccgcccagcttcggctcatcacgcttgcgcagttccaggtgctccggcgttaacaccagcgccatcaggttgtcttcatcgtgttccagcccccagcgggccgccagaacagataaggcgccgtctccggcgcctgtttcatcaattaagcagattttcactgaatgttcagcccataatgccgtaatgctccagcatcgcatccagctgtggttcacgaccacggaagcgtttgaacagctccatcggctcttctgaaccgccacggctcagaatgttgtcgaggaacgactgcccagtttcacggttgaaaatgccctcttcctcaaaacgcgagaaggcatctgctgccagtacatcggcccacaggtagctgtagtaacctgccgcataaccaccggcaaaaatgtggctgaaagcatgcgggaaacggccccatgacggagacggtaccacggcaaccagtttcttgatttctgccagagtttcgaggattttcgccccctgatccggacggaactctgcatggaggcggaaatcgaacaggccgaactccagctggcgcagaataaacagcgccgcctggtagttcttcgccgccagcattttatccagcagctccttcggcagcggctcgccggtttcatagtgaccggagataaacgccagcgcctccggctcccagcaccagttttccataaactggctcggcagttcgaccgcatcccacggcaccccactgatcccggaaacaccagcggtttcaatgcgggtcagcatatggtgcaggccgtgaccgaactcgtggaacagggtgatcacttcgtcatgggtaaacagcgccggtttaccatttaccgggcggttgaagttgcaggtcagatacgcgaccggtttttgcagcgaaccgtcggctttacgcatctggcctacgcagtcatccatccacgccccgccgcgtttgttttcacgggcatacaggtcgaggtagaagctgccgcgcagttcgttgttctcgtcatacagttcgaagaaacgtacatccggatgccagacatcaacatcgttacgctctttagcggtgatgccgtaaatacgtttcaccacttcaaacaggccgttaaccgctttgttttccgggaagtacggacgcagttgttcatcgctgatgctgtagaggtgctgtttctgtttttcgctgtagtaagcgatatcccacggttgtaactcatcgacgccaaattcggctttggcgaaggcgcgcagttgcgccagctctttttcgccttgcgggcgcgcgcgttttgccagatcggttaagaaatccagcacctgctgcgggttttctgccattttagtggcaagtgatttgaaggcgtagttttcaaagcccagcagttgcgccagttcgtgacgcagcgcgaggatctcttccatcaccttgctgttgtcccacttaccggcgttcggaccttgatcggaagcacgagtgctataagcgcgatacatctcttcgcgcagggcctggttgtcgcagtaggtcattaccggcaggtagcttgggatatccagcgtcagcaaataaccttccagctctttcgcttcagcctgggcttttgccgcagccagcgcgctttctggcatccccgccagctccgcttcgtcggtaacgagtttggtccagcccatcgtcgcatcgaggacgttgttgctgtactggttgcccagttcagaaagacgggtagcaatttcgccgtaacgctgctgtttctctttcggcagaccgatgccagagagttcgaagtcgcgcagtgcgttatcaaccgcttttttctgcgccgtgttcagcgtggcgtaatgatcgccatcgcgcaggtcgcgatatgccttatacagcccttcatgttgccctacccaggtgctgtattctgacagcagcggcagggtttgttcgtacgcttcacgcagttccgggctatttttcaccgagttcagatggctgaccggggagaagatacgccccagcacatcgtccacttccgccaacggctggcagagattttcccaggtgtacggtgccccttgcgctactacgcgctccacattttcgcggcagtcgttcagcgccttagtcacggctggaacgacatgttccgggagaattttagaaaacggaggcaattcaaagggagtcagtaacggattcgtcattagcgcagtcctggttaaagaggttaaggaagcgctcaacaggcgctttacataatgtttgtagcatggggttaagtgtagtgaatttcaatgagaaacgttacgctttcgcggcggcggcctcttttcggtatactgtcctgataggcttttgtgcgccccgaatacgggccgatttttacttaccggaacacctttacccatgctcagttatcgccacagctttcacgctggcaaccacgccgacgtccttaaacataccgttcagagcctgatcattgagtcgctgaaagagaaagataaaccgtttctctatctcgacacccacgcaggggccgggcgttatcagttaggcagcgaacatgccgagcgtaccggcgaatatctcgaaggcatcgcccgtatctggcagcaggacgatttgcctgcggagctggaggcgtacatcaatgtggtaaaacacttcaaccgtagcgggcagttgcgttattaccccggttcgccgttgattgctcgccagctactgcgtgaacaggacagcctgcaactgaccgaactgcacccgagcgattacccgttgctgcgttctgaatttcagaaagacagccgtgcgcgcgtcgaaaaagccgacggtttccagcagcttaaggccaagctgccgccggtttcccgccgtggtttaatccttatcgacccgccgtatgaaatgaaaaccgactatcaggcggtggtcagcgggatagcagaaggttacaaacgtttcgccactggcacttacgcattgtggtatccagtggtgctgcgccagcaaattaagcgcatgatccacgacctggaagcgaccggcattcgcaaaattctgcaaattgaactggcggtgctgccagacagcgatcgccgtggcatgaccgcttctggcatgattgtgattaacccgccgtggaagctggaacagcagatgaataacgtgctgccgtggctgcacagcaaactggttccggcaggcaccgggcacgccaccgtaagctggatcgtgccagagtaattgcagccattgctggcacctattacgtctcgcgctacaatcgcggtaatcaacgataaggacaatatgtcatgactaaacactatgattacatcgccatcggcggcggcagcggcggtatcgcctccatcaaccgcgcggctatgtacggccagaaatgcgcactgattgaagccaaagagctgggcggcacctgcgtaaatgttggctgtgtgccgaaaaaagtgatgtggcacgcggcgcaaatccgtgaagcgatccatatgtacggcccggattatggttttgataccactatcaataaattcaactgggaaacgttgatcgccagccgtaccgcctatatcgaccgtattcatacttcctatgagaacgtgctcggtaaaaataacgttgatgtaatcaaaggctttgcccgcttcgttgatgccaaaaccattgaagtcaacggcgaaaccatcacggccgatcatattctgatcgccaccggtggtcgtccgagccacccggatattccgggcgtggaatacggtattgattctgatggcttcttcgcccttccggctttgccagagcgcgtagcggttgttggcgcgggttacatcgccgttgaactggcgggcgtgattaacggcctcggtgcgaagacgcatctgtttgtgcgtaaacatgcgccgctgcgcagcttcgacccgatgatctctgaaacgctggttgaagtgatgaacgccgaaggcccgcagttgcacaccaacgccatcccgaaagcggtagtgaaaaatgccgatggtagcctgacactggagctggaagatggtcgcagtgaaacggtggattgcctgatttgggcgattggtcgcgagcctgccaatgacaacatcaacctggaagccgctggcgttaaaaccaacgaaaaaggctatatcgtcgtcgataaatatcaaaacaccaacgttgaaggtatttacgcggtgggcgataacacgggtgcagtggaactgacaccggtggctgttgcagcaggtcgccgtctctctgaacgcctgtttaataacaagccggatgagcatctggattacagcaacattccgaccgtggtcttcagccatccgccgattggtactgttggtttaacggagccgcaggcgcgcgagcagtacggcgacgatcaggtgaaagtgtataaatcctctttcaccgcgatgtataccgccgtcaccactcaccgccagccgtgtcgcatgaaactggtatgcgttggaccggaagagaagattgtcggtattcacggcattggttttggtatggacgaaatgttgcagggcttcgcggtggcgctgaagatgggtgcaaccaaaaaagacttcgacaacacggttgccattcacccgacagcggcagaagagttcgtgacaatgcgttaaatgttaaagggctaagagtagtgtgctcttagcccttagctacgtttccgctatcagttcagaagctgaagcagaaagcggatcagttccagcagcgcaattaacgccccaagaacgatgattgctttatcaatcacccgttttctccatgcgatggagtgagaatgcatccgcttactcatccattgcctgtcacggcgcatgtctcattgttagatgtgggctatctcactccagccagagccaccaactcagggctgaacagtaaaaaaaccgacgcgaagtcggtttttttacgtcctgattcagacctcctttcaaatgaatgcccaacgcttaattcacacctacacctttctctacacttacatattcgttaaaccatatgtgtttttgacttgtccgctttggtttgtaactctggtggcgctggcgctacacctctctttcacatcgtaatgagatactgatatgagcaacattaccatttatcacaacccggcctgcggtacgtcacgtaatacgctggagatgatccgcaacagcggtacagaaccgaccattatctattatctggaaacaccaccgacgcgcgatgagctggtaaaactcattgccgatatggggattaccgtacgcgcgctgctacgtaaaaacgtcgagccgtatgaggaactgggccttgcagaagataaatttactcacgatcagttaatcgactttatgcttcagcacccgattctgattaatcgcccgattgtggtgacgccgctgggaactcgcctgtgccgcccttcagaagtcgtgctggaaattctgccagatgcgcaaaaaggcgcgttcaccaaggaagatggcgagaaagtggttgatgaggcgggtaatcgcctgaaataaagcggctatattcccccacaggttgttagaaaaatgcgctttatttatgtcggatgcgacgctggcgcgttttatccgacctacaaagttatgataattcgatgaattgtatgttatttgtaggcctgacagtcgtagcgtatcaggcgattttgctatttacacagtactccctgcgtgagattccaattatcgcgtccagcatggtgtatcagtgagctgcttagttatcagcgatacagtgcagcagtttaaagatgtactggattatgatttatcagtggtttacacaataaataatttcaacatacgttaacctattttattattacatatctaaaacatcacaaaaatatcacttcacacactatcagagaacatcatacctttttaaaacgagcattttcgatagttgttaacgttttcttttgcgatatgattattgcctttttttgcactcaaatattaccagatggaaataaaagagaagtcaaaggtaattatatcaggaagatatgacgcattatatttactgtatgtagaagaaaatccattcctgttctaattatccaatttaaaaatcttagcataaaacaaatgatgaataaggaatgttatgtcaattgactttaccccaggtgtaataaatacatataacggtgatatttataactgcacaacaaataccgataatgttaaaacgccagacacaccgaagtggccttgtgataaccgggaagaacaacaccccattaatgccccattctctggagaatggatacacctctgaacaatttgatttagcgcaacaacgccaacaaattaatgcgtgccatacgaacaccacatatacaaatgcagactactcaaagttgaggctcaacttgtaagtcttattaataacattgaaacgataagctcgacaccacttccgcaaaagacacaatcaatacttaatcagataaataacattagacacgaaaagattaaaaacctctgaatatagattatggaacaatggatactcatgccacgcccaaaaattaactgagctcaactaaacagaagagatataaacatcagacaggtttacgttactatcaggcatatcgcctcagaatcagatgaaaactataaagaaatatctattatggttttaatatttgttgataaggatagtaacatgaacatgacaaaaggtgcactcatcctcagcctttcatttttgcttgccgcatgtagttcaattccgcaaaatatcaaaggcaataaccaacctgatattcaaaaaagttttgttgctgttcataaccagccggggttatatgttggtcaacaagcgcgctttggcgggaaggttatcaacgttatcaatggtaaaacggatacgttgttagaaatcgctgtattaccgctggatagctatgcgaagcccgatattgaagccaactatcagggccgactgctcgccagacaaagcggcttccttgatccagtgaactatcgtaatcactttgttaccatcctcggtaccattcagggtgaacaacctggctttatcaataaagtcccgtataacttcctggaagtgaatatgcagggcatccaggtgtggcatttgagagaagtggttaataccacctataacctgtgggattacggctatggtgcattctggccggaaccgggctggggggctccttactacaccaatgcggtgagtcaggtaacacctgagctggtcaaataacaccaccgaaagatgcagatgctttctcagcatctgcatcatgcattacatcaaattaatacacagtaagctaactattattataagccctgtcctgttaattacctttggcaaactgattataaagttaatgtccgtaccaggagtcggttatgtttcttataattaccagggatacgatgtttttcaccgcgatgaaaaacattctgagtaaaggtaatgtcgttcatatacagaacgaagaagagatcgacgtaatgttgcatcagaatgccttcgtcattattgatacattaatgaataatgtatttcattctaattttctcactcaaattgaacgattaaaacctgtccatgtaattattttctccccctttaatattaaacgctgcctggggaaagtaccggtgacctttgttccgcgaactatcgccatcatcgactttgtcgcactcatcaatggcagttactgctctgtgcctgaagcggatgtgtccctctcgcgcaagcagcatcaggttctgagctgtattgcgaatcaaatgacaacggaagatattctggagaaactgaaaatatcgctaaaaacgttctactgccataaacacaatatcatgatgatcctcaatcttaagcggatcaatgagctggtacgccatcagcatattaattatctggtgtgaacgattgaacaatataaagaggcccagcaacagccagacctcccgttaattatacgttatgcagtaacgccttccggtatcaacgaagcaatttgcttacgccattgcgcttgctcctgttcaccttctgtacgttgaccataaagttgcgctatctgcgtaccatcatgggcaaacaattccaggctggttacgtggccatcgctggtcggtttacgggtaacccaggcttcagcaatgctctcttctaatagatgaagggtaaacgtcgggttgaaaatattcagccaacctttcattggcaccactttttctaccacaccggtgaaaatctgtacgcagccacggttgccaacaaacaccatgatttcattgccatcctgctgtgcagattcaagaatttgcgccaacgcactgttggatactttgcaggccaaatcgtctgccaccagattgaacgcctgttggcgcgtcaggttgtggcgcttgagcaacgtaaaaaactgatgaacgtcggtcatcgcccgccactcttgctcgaccacactggcatcggctcgcgtttgaacaactggcgcatcaacggcttttaactcaagcggcgtattctcatcggtgataaaccgtgccagaagctcactccatgccgccatatcggtattgtcggtggcataaacttttagtaatgcatcgccctgatgatcaaagaactgaatactctggcgttcgccacgagccgtgttttctttgatgtggaaaacactggcccattgattgagaaacagacgtaaatccagcgcgcgcggattgaggatcaatccggcatgtccgttcaaatgctggtttgtgaacgcaccaacttgttcatggactgcgtattcattacggcaaatacatttggtctcgccaacactttcgagcgccgccagaatttcacgaatatcgccgcgcatccgccacgcgtcgtgcgtgacgcgtgcaaatgccagttctgcttcgctgatattcattaaacctgcgatgtcacgcgcgtactttccgggattttgttcttttaactcaagccagcgtgtgtagtggttcattgtctctcttccttccagataaatgccccgaaatatcggggcagatgattaccattgataactcacgaaaatttttccgttacgaccatcctgtgggatgccttgcggcgaccagtactctttatcgaaggcgttgcccaataccagagtagtggtcatgcctttgagcgcctgctgcccttgataactgacgtagaaatcattcacaccatagccaggttgtttgctgtagctgctgctgatatgtgttgagcgatcggcaaacgtaccgacccaaccaacagagaagccgctgtgagcgatcggaatattcagggtactggtaacggtatccgggttaatgctggagatatattccccggtatcggtgtctttgccgcgggtacggttataggccacatcaaggctaaacagatcagtggtatatttcgtcatcacatcccagccccagattttggcgttcgggacgttatacgacatagttgtcgccgccgcgaaatcgacggtcgtggagatataatctttcgctttggtatcaaagtagctggctttaaattccagagcatcattggacaacatcaggtcatcaaaacgcagcccaaaaccgtactcctgagtttcgttagtttccggacgtaagttcgggtttggcacccaatagttggtatagaagcgaccaatcgagaagtgtttagaatcgttatacatttcgcccatcgtcggggcgcggaatgcctgagcatatgagccaaataacatcagccagttggtcgggttgatagtcatccccgcacgagatgaccatttgtcggcatcaacatctttgtagccgtcgctgctaccgcgataactgtcatagcgggttccgccaagcagggtaatcggcagatcgcgtaaggtgatctcatcttgtagccagccagagctaaaatcgatttttgcttgcgggaagcccgtcgtcgcgccacccggatgttgttcctgacgataatactcaccgccatatgtcagtaagtgagaagcgaaactgtcggcaaatagagtggaacggttctccagccttgctccttttgttatctgttcacgatactcgcctgaactccccgtgttttgcgcattaatacggacttccgaccagtaaatttttgcatctgcatttaaccagtcgttaccctgcggggcgagtttataagaaagctgcgcatcgcgttgaattgttgaacgatcgaccatcgggttgctgctatcagaagcttcaacggtctgcggattttttggttcacgcgcgtcgttgttgtagtaacgcactaaaccgctcagagactgggctgaatcaatttgccaggtccctttcgccagcatgttattaatggactcgtcattcggcgcggtttcaccattgctctggcgtaaatcaccccgatcgcgactggaccaggccacaataccatccagattttcagttcgcccaaacgcgctcgcgcctaatcccaggctatggtcccccgtgccgccagtaccaaagacacgaaaaccactgctttgtccttcctgcaataaatcttttgcatcgaccgtatcgtaggagatcactccacccagcgcgccactgccatacagtaatgctgaaggtccgcgaacaatctcaacacgcttgatcagcgccggatcgagaaaagtgccattcaggtgtccggtatccgttccctggcgaacaccatcgacaagaaccagcacgccgcgatgatcatagccacgcatatttacatcctgaccgttggttcgtccggtaccatcaagagtaattccaggaacatgacgcagcaaatcagtggctgaagtagcagtttgattttcaggagcggaagtgtcgataacgctgaccatcataggcgcttcgaaggaactacgtgcattccccgttgccgtaacggtcatggtttcagtagcaaaagcaaacgttggcaaggtggcagaaacagccaaagccaacaaactcaaacgcaacgaggtaaattgcggacgtgacatagcgattctccatgaggaaaataaaaaatgctggctgcctgggttaataccggggtggctggcgaaaaataaatttatttacaattcaaatgattagatatcaccacgggaagctattagcgtatatatcccgtaaaattgccgaatatttctgataattcagcaaaagcacgccctctttgtcaggcaaagtagtacgccacgtctgaagtgaagagtgctgtgcgttttcccttacaaaagatatgattttgttatccatgatgtcatattttgttaaactcaaacgtgataatgagaattattatcgatcaattttttatgatcaagctttttttaaccgccattaacacaataaacagggggttatgaaatctatccagcatccagaaaaccatcctgtgtttatggctatccccccacaacctcatcacaaaacgttgtcgttaacagtgataattttctcttctctttgctctgcaagccgcgatatctccgggttctcagctttttcccgcgctgaaatttaatcggtaacaagaacattagctgacgaagcatcttgataaaaatcaaaaataaatacgcttgtaacgccgtgcgtattgaatcgacggttgtatttcatatataactcaaatgataatcatgatcattctcaatttgataagagttctcacattatgccaaggatcatcaccaggccgtttcttttttccccactaacgttatgtatttcagccgtggtctctgccgcgaagaccatggtaaaacgaaaaaaattgtttacggcattactggctcttagctggacttttagcgtaacggctgccgaacgtatcgtggtcgcaggaggatcgctgacggagttaatctacgcgatgggcgctggcaaacgcgtggttggtgtcgatgaaacgacatcttatccaccagaaaccgccaaactgccgcatattggttactggaaacaactcagcagcgaaggcattttgtcacttcgcccggatagcgtaattacctggcaggatgcaggaccgcaaattgtgctcgaccaactgcgggcgcaaaaagtcaacgtcgtcactctgccgcgtgtaccagccacccttgagcagatgtacgccaacattcgccaactggcaaaaacgttacaggttcctgaacaaggcgaggcgctggtgacacagatcaaccaacgcctggagcgagtacagcaaaacgtggcggccaaaaaagccccggttaaagccatgtttattctctccgcaggcggaagtgcgccacaggttgccggtaaaggcagcgtcgcggacgccattctttcgcttgccggagcagaaaacgtcgctacccaccagcagtacaaaagctacagcgcggaatcgctgattgcggctaaccctgaagtgattgtcgtcacctcacaaatggtcgatggcgatattaatcggctacgttctattgccggaattacccacactgccgcatggaaaaaccagcgcattatcaccgttgatcaaaacctgattctgggaatgggtccgcgtattgctgatgtcgttgagtctttacaccagcagctttggccgcaataaatggatttaaatcagacgaatgaacacaaataacaccctggatctcacgccacattttgctttagacggtgatcagccctttaaagacaggcgcgccatgatgccgtttcgtggggccattccggttgccaaagagcaactggcacagacctggcaagagatgatcaatcaaacggtatcaccacgtaagcgactggtttacctacacattcctttttgtgcgacacactgcacgttttgtggtttttatcagaaccgttttaatgacgatgcgtgtgctcattataccgacgccctgattcgtgaaatagaaatggaagcagacagcgtattgcatcagtctgcccccatccacgcggtctatttcggtggcggtacgccttccgcgctttcagcacacgatttggccagaatcatcaccacattacgagaaaagctgccactggcccctgattgtgaaatcactattgaaggccgggtactgaattttgacgctgagcgaatcgatgcttgccttgatgctggagcaaaccgcttctcaattggtattcagtcgtttaacagcaaaatccgcaagaaaatggcccgcacctcggatggcccaaccgctattgcgtttatggaaagcctggtcaaacgcgaccgtgccgcggtggtctgtgacctgctgtttggtctgccgggtcaggatgcgcaaacctggggagaagatctggctattgcccgcgatatcggtctcgacggcgtcgatctctatgcgctcaatgtcctgcccaatacaccgctgggcaaagccgtggaaaatgggcgtactaccgtgccctctccggcagaacgtcgcgatctttacctgcaaggatgtgattttatggacgatgccggttggcgctgcatcagtaacagccactggggccgtaccacacgcgaacgcaatctctataacctgctgattaaacaaggtgccgattgtctggcctttggttccggagccggcggttcgattaatgggtactcctggatgaacgaacgcaatcttcagacctggcatgaatccgtcgcggcaggcaaaaaaccgctgatgatgatcatgcgtaacgccgaacgtaatgcgcaatggcgtcataccttgcagtcgggcattgaaacggcgcgtgtaccgctggacgaacttacgccacatgccgaaaaactcgcgccgttactggcccagtggcaccaaaaaggcttaagccgcgatgcgtcaacgtgtctgcggttgaccaatgaaggtcgtttctgggcaagcaacattttgcagtctcttaatgaactgattcaggtacttaatgcgccagcaattgcgcttgaaaaaccataacaggagtgatttatgagccatgtctcgttacaggaatttttgaaaacggagccagacggtacgctggaggcgatcgccgaacaatacaacaccacgctgctggaggtagtgaaaaatctgccctctccgactgttgtgtcaggtgataaattcgatactgtctgggataccgtctgcgaatggggcaacgtcaccacgttagtacatactaccgatgtaatactcgaatttagcggcgaactgccttcgggtttccatcgccacggctatttcaacctacgcggaaagcacggcatgtccgggcatatcaaagcagaaaactgcacgcatattgccttgatcgaacgtaaatttatgggcatggacaccgcctctattctctttttcaataaggaaggcagcgcaatgctgaaaatcttcctcggtagggatgatcatcgtcagctcctgagcgaacaagtcagcgccttccatgctctggcagcatcgttaaaggaacacgcctgatgacaccgtggctactctttggcgcaggcggaaaaggtgtgggtgccagaacgcttgaactggcgctggcggaacaacgtccggtcgttgctgtcattcgtcatgccgatgccgccacgaaactggcgcaacaaggcgtacaggtttttacaggcgacgcctgtgatgccagcgtagtcgcggctgcttgccgcgcagctggcccggatgcgcttatcatctcaacaatgggcggagctcaggattatctggcgcacagaacagtgattgacgaggccgagaaagcaggcatcacacgcatgattctggtgacgtcactgggatgcggcgatagctggccgtttttatcagagcgggcaaaggctgcgtttggtcaggcggtacgggaaaaaacgctggcggaaagctggttgcaaaccagccagcttgattatgccattctccgccctggcggtctgcttgatggtgcggcaacgggcaaagcacaacggatacaaaatcaggagtgtcatggttttattaaccgtgctgatgtcgccgcacatatccatgaactggcaaatgcgccagcacttaaccagcaggtctacagtctgattgaaccggacctgaaaccggcgtgatcccccggcgcggcatgtccgcgccgtaatgtcgtaacggagttttgcgtgctcaaggattcactctcttccgccagggtctttatggggctatcactattattgctagctctggtgctgtttggtgccagtcagggagcgttaaagatcagttttgatgccctttttgatgaggaataccgcgatatctggctcaatattcgtctaccacgggttttgctggcggtgctggtaggtgcagcgttggcaaccgccggggtaattatgcaggggctttttcgcaacccaatggctgaccctggattactcggcgtcagtagcggttctgcattaatggttggcgttgctattgtgctgcccttctccttcccagtggtgctggtgctctatgagcaaatggtgtttgccattgccggaagtttagtggtctgcaccatcatttttctcatcacgcagcgccatcgcgatggcagcatgatgcaattattactcgccggtatcgccatcaatgccctgtgcggcgcagcgatcggcatcctgagctatatcggcgatgagcagcagctacgacaactcacattgtggatgatgggcaatcttggacaggcgcaatggccgacgttattggttgccagttcattcatcctaccggccattatcgcaacaacttgtctcgccggaacgctgaatttactgcagctcggtgatgaagaagcccactacctcggcgtgaacgtgaagcgtaaacgccagcaattactgttagtgagctcactgctcgttggtgctgccgtatcggtaagcggcattatcggctttattggcctggtgatcccgcatctgattcgcatgactaccggggcaaatcaccgctggctaatcccttgttccgccctcgccggagcctgtttattgctgatggcagacacgcttgcccgcacgctggtacagccagcagaaatgcccgtgggattattaaccagcctgcttggtggcccttattttatgtggttgattctgcgcaaccggaggatcacatgatcagcgcccagaatctggtttatagccttcaggggcggcgtctgactgataatgtctcgctgacttttcccggtggggaaattgttgccatcctcgggcctaatggtgcgggaaaatctacgctgcttcgccagctaaccggctatcttcaacctgatagcggcgaatgtcggttgtttaataagccattaaatgaatggtcgattactgaactggcgaaacaccgggccgtgatgcgtcaaaatagccacatggcgtttccattcagcgtacaagaagttatccagatggggcggcatccgcatcgtactggtaatcaggataatgaaacagcacaaataatggcgttatgtgactgtcaggcgttagcaaaccgcgactatcggcaattatccggtggtgaacaacagcgcgtgcaattagcgcgcctgctggtgcaactctgggaacctactccctcaccgaaatggttatttcttgatgaaccaacttcggcgctggatattcaccatcagcagcacttgtttcgtttattacgccagttagttcacgaacggcagttcaatgtttgctgcgtattgcacgatctaaatcttgccgcgcgttatgcagaccgtgttgtattaatgcaaaaaggaaaggttatcgcaaatggtaagccgcaggacgtattgacacagcaggcgctaacaatgctctacggcgcggatattaccgtacttaaagatcctgccaaccattcaccactgatcgtcctcgatcattaaaaccaacaggagtaccgcactggtactcctgcgaataaataactatacagattagctaattgaaacgcctttcacccctgccataccttttaataatcgcaacagatcttctatcgacgtcgtggcatgaagctggatatcaatggcgaccacttcatgatcttcattttcctgcaacgaaactaaatccgtttttattttttgctgcttaaaccagtcgagcattgataccgtattaccgttcactaatgtcagctgtaaatggtaatttttgttcatcaggcggaaggttaattgatggaagacttccagcaccagcaaggtcatcactgaaccataaatacccagttcgtacataccgctgccaataaccataccaatggcggcggtcacccagatatccgctgccgtcgtcagacctacaatattttggttacgaacgagaatgttacctgcaccgataaacccgacgcccgtcacaacctgagcagcaatacggctgggatccagtccgacgtgacctaaagacagcacgtcagcaaaaccatatttcgaaacaatcataaacagggcgcttcccatgccaattaatacatgtgtgcgtaaccctgctcctttgccgcgcatttgcctttccatgccaatagcgccacaggcaattaccgcaagtataagtcgtataataaattctgctgtcatataaaaatgaaaaaaggagcagcaagatggctcaacttgctactcctttttacttgtaccttattaattcggcaagtcattagatgcttgatttttgaaggtatacaaatttttctgcgggtttttcttgcagtattcgatcactttaggaatttgagtgagatcggtttcatttaaagtaacggtatcgccacctttatatactgtttcttcatgcagcatccaccacgcaactggtgtcattgcttttggattcagatcaataaattcctggcaggtcatatctttagcggattcattggctgccagcgcagattgtgcgttcaccagtgacaaagccgctacagcgcccataaaaataaacgctttacggagagatgaaatgttcattttgtaacccattcaatatagagattatatacaaacaggaggaatagctgcttttaaagaagatattccggcctgttcaatatgcaaggaaatacgatgtaacgcattcccggaattacatatctttcttaattttgtcccattcgcctttaactttatctttaaagctggcttttttatcctgagtacaagcctgaacgatagctggggttacggttgcaataccctgaacatctaaaaccgcatcttctggtttatctttgttgttcagtgcttcagcaaaaccgactgcagttggctggaaggattcgtccacagccaggaaatcttcacaggtccaggagttgaccggttttttgttatcagctgctttttgtgcatccgctgcattgctcactactggcagaagaagcagaccaccaagaataacgcctaatacttttttcatcgtaatatcctcaactataaagtgaaagagccgtcacgaatcaatttcgacactgaggttataacctggttttctgtatatgtcatgttgatggaaaatatcaaaatcagatatttttatttcaatacaatgagttacagatgcatcagatactgtaattaggaaatttttattaaatcgactgcattcttacacgcgtttttggcatagattgatagcaggggattttcttcttaattttatagggtggttctatgttatatatagataaggcaacaattttgaagtttgatctggagatgcttaaaaaacatcgcagagcaatccagtttattgccgtgctgctgtttatcgtcgggttgctgtgtatcagttttccgttcgtctctggcgacattttaagcacagtagtgggtgcattattaatctgctcgggcattgcgcttattgtcgggctattcagcaaccgcagtcataatttctggccggtattatccggtttcctcgtcgcagtcgcctatttattgatcggctatttcttcatccgcgcaccagagctgggcatttttgccattgcggcatttattgccggtttgttctgtgtggcaggggttattcgcctgatgagttggtatcgtcagcgttcaatgaaaggcagttggctacagctcgttattggtgtgctggatatcgtcattgcctggatattccttggtgctacgccgatggtgtcggtaacgctggtttccacactggtgggaattgaactgatatttagcgccgccagtctgttcagcttcgccagtttgttcgttaaaaagcaataattatccctatttccacctggatcatagtcacattaagtgactatgatccagttaatactctcttagctatacagtgtttcagttcaattacgcactatcattgaaacaattgcctgctgttgattatttcaacctactgaatttaatctgatttttttcgttccatggcaaattagccatttcaaacattatcatggctgatattttccgtggtcaggtttaatgttttaaaagtgctgtgggaaagtgaacaaagagttccgtaagcgttgatgctatgggcggttaaataagtaatccgggttcatttttttgcaactggcgttgattacattgcataaatatccgtgtctccagacgctatataaaaacctgaagacatgaatgagttatttaatcaggtaatttcaatgcgttaaaagaaagctggcaatccaattgccagcctaagtcgaaacaaggagactcgatatttaaatcggattacattttaactttagtaatattcttcagagatcacaaactggttattgataacttattcttgggcagtaatccgcaaaagttaaccttttgtttactggttacaaactgataacaaccaggaatcttacttaggatcaatatatggagtgcgtgatggataaatctgaagtattgattagtgttaatagacgtattagttcacgaagggcaaagttcttataggcgtttactatattgaacaacgattcggacaaggatgtaaataatgaaaaggatgacatgttcgaaacgataacggctaaggagcaagttatgatttttctcatgacgaaagattcttttcttttacagggcttttggcagttgaaagataatcacgaaatgataaaaatcaattccctgtcagagatcaaaaaagtaggcaataaacccttcaaggtgatcattgacacctatcacaaccatatccttgatgaagaagcgattaaattcctggagaaattagatgccgagagaattattgttttggcaccttatcacatcagtaaactaaaagctaaagcgcctatttattttgtcagccgtaaagaaagtatcaaaaatcttcttgagattacttatggtaaacacttgccccataagaattcacaattatgtttttcacataatcagttcaaaattatgcaactgattctgaaaaacaaaaatgaaagcaatatcacgtcaacgctcaacatttcgcaacaaacattaaagattcagaaattcaacattatgtacaagctgaaattaagacgtatgagcgacatcgtcaccctgggtatcacatcttatttttagtaaggacataagcagctgaaattgatggctggcatgacgagggatgcagatgctgatttcaatacccccggtgattattgaaggagagacgaaaacgactttattcccctggtatgtgtatccaccagtagaacccttcgttgcccgaatgctggcagaaactgttggcagaacggcaacattttttttgtcgttgacctcaccatgtcgatcactgtgcttgcatcccatcttactggctgacaaccccactatgccgctggtctgtaaatccctcatatctctcctcgcgcgcaatttaaagaaccgttatttctcaagaattttcagggactaaaatgaacagaagaagaaaactgttaataccgttgttattctgcggcgcgatgctcaccgcctgcgatgacaaatcggcggaaaacgccgccgccatgacgcctgaggtcggtgtcgtcacactctcccccggttcggtcaatgtgttgagcgaattgcccggtagaaccgttccttatgaagttgccgagatacgtccccaggtgggcggtattatcattaaacgcaactttatcgaaggcgataaagtgaaccagggcgattcgctgtatcagattgatcctgcgcctttacaggcagagctgaactccgccaaaggttcgctggcgaaagcgctctctaccgccagcaatgcccgcatcacctttaaccgccaggcatcgttgctgaagaccaactatgttagccgtcaggattacgacaccgcgcgcacccagttgaatgaagcagaagccaatgtcaccgtcgccaaagcggctgttgaacaggcgacgatcaatctgcaatacgcgaatgtcacctcgccgattacgggcgtcagcgggaaatcgtcggtgaccgtcggcgcactcgttaccgctaatcaggcagattcgctggttaccgtacaacgtctggacccgatttatgtcgatctcacgcagtcggtgcaggatttcttgcgcatgaaagaagaggtcgccagtgggcaaatcaaacaggttcagggcagtacgccagtacagctcaatctggaaaatggtaaacgttacggccagaccggcacgctgaaattctccgacccgacggtggatgaaaccacgggctccgtgacgttacgggcgattttccccaacccaaatggtgacttgctgcctggcatgtatgtcacggcattagtggatgaaggtagccgccagaatgtattactggtgccgcaggaaggcgtcacccacaacgcccagggtaaagcaacggcactcattctggataaagacgatgtcgtgcagctacgcgaaatcgaagccagcaaagccatcggcgaccagtgggttgtcacctctggcttgcaggctggcgatcgggtgatcgtttccggtttgcaacgcattcgtccgggtatcaaagcacgtgcaatttcctccagccaggaaaacgccagcaccgaatcgaaacaataacgttgcaggcttaaggggactttcatggctaactattttattgatcgcccggtttttgcctgggtacttgccattattatgatgcttgcaggcggtctggcgatcatgaacttaccggttgcgcagtatccgcagattgcaccaccgaccattaccgtcagcgcaacctatccgggtgccgatgcgcaaacggtagaagactcggtcactcaggtgattgagcaaaatatgaatgggcttgatggcctgatgtacatgtcttcaaccagcgatgcggcaggtaatgcctccatcactctgaccttcgagacggggacatcgcctgatatcgcacaggttcaggtgcaaaataaactgcaactcgctatgccttcattacctgaagcggtgcagcagcagggaattagcgtcgataagtcgagcagtaatatcctgatggtagcggcatttatttctgataacggcagcctcaaccagtacgatatcgcggactatgtagcgtctaatatcaaagacccgctaagccgtaccgcgggcgttggtagcgtacagctctttggttccgagtacgccatgcgtatctggctggacccgcaaaaactcaataaatataacctggtaccttccgatgttatttcccagattaaggtgcaaaacaaccagatttccggtggtcaactgggtggcatgccacaggcggcagaccagcaactgaacgcctcgatcattgtgcagacgcgtctgcaaacgccggaagaatttggcaaaatcctgttgaaagttcagcaagatggttcgcaagtgctgctgcgtgatgtcgcccgcgtcgaacttggggcggaagattattccaccgtggcgcgctataacggcaaacctgctgccgggatcgccatcaaactggctaccggagcaaacgccctggatacctcgcgagcggtgaaagaggagctgaaccgtttatcggcttatttccctgcaagcctgaagacggtttatccttacgacaccacaccgtttatcaaaatttctattcaggaagttttcaaaacgctggttgaggctatcatcctcgtcttcctggtcatgtatctgtttttgcagaatttccgcgccacaatcatcccgacgattgccgtaccggtggttattctcgggacgtttgcgatcttgtcggcggtcggtttcaccatcaacacgttaactatgttcgggatggtgctggcgatagggttactggtggatgacgccatcgtggtggtggagaacgtcgagcgtgtcattgcggaagataagctaccgccgaaggaagcgacgcataaatcgatggggcagatccaacgtgcgctggtcgggattgccgttgttctttccgcagtgtttatgccgatggcctttatgagcggtgcgaccggggagatctaccgccagttctccatcacgctgatctcctccatgctgctttcagtatttgtagcaatgagcctgacccctgccctgtgcgccaccattctgaaagccgcgccggagggcggtcacaaacctaacgccctgttcgcacgcttcaacacgctgtttgaaaaatcaactcagcactataccgacagcacccgctcgctgttgcgttgtaccggtcgctacatggtggtctacctgctgatttgcgccgggatggcggtgctgttcctgcgtacgccgacctctttcttaccagaagaggatcagggggtatttatgaccaccgcgcagttaccttccggtgcaaccatggttaacaccacgaaagtgctacaacaggtgacggattattatctgacaaaagagaaaaataatgttcagtcggtgtttaccgttggtggctttggcttcagtggtcaggggcaaaacaacggtctggcgtttatcagcctcaagccgtggtctgaacgtgtcggcgaggaaaactcggttaccgcgattattcagcgggcaatgattgcgctaagcagtatcaataaagccgtcgtcttcccgttcaacttacccgcggtggctgaactgggtaccgcgtcaggttttgatatggaactgctggacaacggcaatctggggcacgaaaagctgacccaggcgcgaaacgagctgttatcactggcagcgcaatcaccgaatcaggtcatcggggtacgcccgaacggcctggaagatacgccgatgttcaaagtgaacgtcaacgccgcgaaagccgaggctatgggtgtggcgctgtctgatatcaaccagacaatttccaccgccttcggcagcagctacgtgaacgacttcctcaaccaggggcgggtgaaaaaagtgtatgtccaggcaggcacgccgttccgtatgttgccggataacatcaaccaatggtatgtacgcaacgcctctggcacgatggcaccgctttctgcctattcgtctaccgaatggacctatggttcaccgcgactggaacgctacaacggcatcccgtcaatggagattttaggtgaagcggctgccgggaaaagtaccggtgacgccatgaaatttatggcagacctggtcgcaaaacttccggcaggcgtcggctactcatggaccggactgtcgtatcaggaagcgttatcctcaaaccaggctcccgcgctatatgccatttcactggtcgtggtgttcctcgccctcgccgcactttatgaaagctggtcaattccgttctcggtgatgttggttgttccgttaggcgtcgttggcgcattactggccaccgatctgcgcggcttaagtaatgacgtttacttccaggttggtttgctgaccaccatcgggctttccgccaagaacgccatcctgattgtcgaatttgccgttgagatgatgcagaaagaagggaaaacgccggtagaggcaatcatcgaagcagcgcgtatgcgtttacgcccaatcctgatgacttctctggcctttattctcggcgtgctgccgctggttatcagtcatggtgccggctctggcgcgcaaaacgcggtaggtaccggcgtaatgggcgggatgtttgccgcaacagtgctggcaatttacttcgttccggtctttttcgttgtagtggaacatctctttgcccgctttaaaaaagcgtaacgtgtaaatgagagtaaggttgaacgtgagggttcagccttactctttcctgctaaccattcaccactcaacaaccagctaaccgtcaggaataccaggcttagtacacagcactgaaagtagaaaccactccagccattcgtcatcaatttgaacagcacaatactgacccacattcccgtaatcgtatgaattgttagcttaataatcccaaacatgccgagtcttttcctcctgaaaatacctataccgcctggcaaactacgaaagagaactagccggtagcccggcagaaatcatcaggaaagagtttcacatgaagcagacgtgagatcctgaccaatattcaaatgcgaaatatgtcaggaaaaggtacccggcgaatgttgcgaaaactgatgtggcgttacaccataatattgtctaaatgtatttataaagtatgacgtactgctatagccacatttttccgcaatagtatgcagaggtatttgacgtaactcgagtaatcgtctggccatcgacatcctggaggcgagtaatattttactgaaacaggtattttcatcctgcaacttttttttgatgagactctcgctggtgtacattctttctgcgatatcgcgtagataccaacgtttagcgatatcaaagctaataaggcgttcaacttttcctgaaacagtactgatactattgaaaagtaaggggatcagttctttcttatgagaaaacattgataaacaggaaagatagagcattttgctcagtatcggcgaattgacccgggggtcattgaaactatcaaaaatcgccgtcaccagctgtatggggggtgactggttaattaacaaacggtctttgctatgcaatcctaaattgcgtggcaactgacgaatattttgtaagtaatggcaaactgtcagctcttcgatatccagccgtcgcgtatcaagtgaacaaaacgcaaaatcgtctgccaaatttttatccagcagcaggatactctcgttatgcaacgatattttttgctgttcatgatgaatatcgaatgaacgacgaacgaggatcaccgagcagacatgagccatgactatcccttatatttcattactgcgattatttcaatgtcagtatactaatgaaatgacgccagactgtttctgtgtgcaaaaactgccatatttggtaggaccaaattttatccacaaagtagttttgcataacagttaattgataataagtaaatgcaacacgattatattttcacacagcgtatagcttatgtttataaaaaaatggctgatcttatttccagtaaaagttatatttaacttactgagagcacaaagtttcccgtgccaacagggagtgttataacggtttattagtctggagacggcagactatcctcttcccggtcccctatgccgggttttttttatgtctgagtaaaactctataatcttattccttccgcagaacggtcagtgccgtaaaaaatcccttgcgcagccatacttgccgccgagccacagttcggtaattcctgcgccgatcgctcctgatactctgtgggcgtcatcccataataatttcgaaaaacgtaaatgaaatacgacacgctgtgatatccacaggatactgcaactcgcttaattgaaaccccatatataacaataagttgtaaagcacgctgcatcctacactcagtaagcaactgtgaatatgacgtaccttcttcgcgcaattttttctttaacaggcttggactcatcaacaattcgctagcaattcgggctaatgtccactcatgggcgatattattattgatgaccgtacaaactcgtgttcgcatattcggttgcaacacgttcagaagtaacggtataaactgcgtatcctcaagaaaaacagataacaacgcaaagattaatgcccttttacgtagcatttctgcatagcgaagattcttattctgcgatagttgcgcaacttcctgaaaaacaggaatatctctggtacagtgatgaacgagtaatgaaggaacttttttatgtacatgaagttttaatgcctcctccttgagcatcgggagaaataatgaaagcgtgtctcttgaaactaatacgaaattctcaacacacttatccacttgaatttggcttgcatccgcaaaaaccagatcaccgccattaaaatagcgatattcaccattaaccatggtgagaatatatttatgtcttgcgtacgcaattagacaattaccatgtagtggttgcatagttgacttaatattacataaacatattactgtttattaatgtagcacgccgccctcttaagtcaaattgattgataaataaatttaaacgaagcgggaaaacaggatgataatgagcgatgatactcgggctggatgactggatttattatataaaaaggggacttaagaacgcagaggaattaatagtaagcaaataattcatcatcgtaatattaagcagtatcgctatgctccataacattcatataacatatatcttatcaacacgatgaatagacaggtaatatattattgcaattaataaatagccgaatacccacctgtttttaaaggttgggcattcggtttttacaacgtgatgttatcaggtgtgtttaaagctgttctgctgggcaataccctgcagtttcgggtggtcgctgagatatttcagggaggctttgtagtcttccagcaacagttcagcaaagtccatttcgaagccgcgacgacacataatgcgcatcaccacgatgtcggtggcttcaccgccgagagtgaaggccggaacctgccagccgcgcagacgcagacgttcagagaggtcgtacagggtgtatcctggatcttcaccatctttcagtttgaagcaaaccgccgggatgccttcgtccgggcgaccggtacagatgaactcatacggccccagtttggcgatttcatccgccagataagcggcaacctggtaggaagcgttctgtactttggtatagccttcacgaccgaggcgcaggaattcatagtactgtgcaatcacctgacccgccgggcgggagaagttgatggcgaaagtaccaatctgaccgccgaggtagtcaacgttgaacaccagttcctgcggcagcgcttcttcatcacgccagataacccagccgcagcccagcggagccagaccgaatttatggcctgaagcactgatcgatttcacacgcggcaggcggaagtcccagacgatatccggggcgacgaacggtgccaggaagccaccgctggcggcgtcgatgtgcatgtcgatgtcgataccggtgtcggcctggaatttatccagcgcatcgtgcagcggctgcgggaactcatagttaccggtgtaggtcacgccgaaagtcggcaccacgccgatggtattttcgtcgcaggcttcaatcatgcgtttcgggtccataaacaactgaccggggcgcatagggatctcacgcaactccacatcccagtagcgggcgaatttatgccagcagatttgtaccggaccgcacaccaggtttggtttatccgttggtttgcctgcggcttccatacgcttgcgccaacgccatttcatcgccatcccgccgagcatacaggcctcggaagaaccaatggtgttggtgccaacggcctgaccatttttcggtgcaggcgcatgccacagatcggcaaccatgtttacgcaacgcaggtcgattgcagcggattgcggatattcttctttgtcgatccagtttttattgatcgacaaatccatcaatttatggacgttttcgtcgtcccaggtctggcagaaagtggccaggttctgacgagcgttgccatcaagatataattcatcattgataatctgaaatgcaacatcatcgcgcatttcgtgcagcggaaatcgttttgactccgcgatagtagaaatggcctttgcgccaaaacgtgaatcgagtagttctgagcggaaatccgttaacagcttctggtccatttcgaactccttaaatttatttgaaggcaataaaaaagtaggatttatccgcaatggaagcaaggtattacaggcttaatttaaataacaaaatcctaagcagaaaaacgactttttataatataaacatttaatatgataatattaaaaacagactttattatcgtaataaaaatcgcccaaacactcctgttcgggcgatcaaattaattattgtttatcctgcatatacggcgtgtaaaccccgttcagactgtgcaggaaagcgacgatatcatccacatcctcctgcggcagctctttgcctacctgatagcgcagcatcagtttcaccgccccgtccagcgtcggcacgtcaccgcgatggaagtacggtgccgttaaagcaacgttacgtaaaccgggtactttctgacgcaatttatcacgctcttctttagtaacattcatacgaccaatatccgccgccgtaatttcaccaaagttaaagtcttttttcagccccaacggttcaaaggaacgtccgccgagaataataccaccatgacaagttgcacatttattatctttaaataattgatagccttttttctgttgcgccgtcagagcattctcatctccacgcaaccatctatcaaatggggaatccggcgtaattaatgttttctcaaattcagcaatggcatcagtaatattttcgccactgaaaccttgcggatagacttcgaggaactgcgctttaagctgcggatctttttccagcttagcaataatttcgtcccaggatttcgacgccatttcaatcgggttcaacggcggtccaccagcctgatcctgcaatgttgccgcacgaccatcccagaactgctcaacattaaatactgagttaaataccgtcggcgcgttaatcggcccaactgcgccaccaacaccaatcgatgtttttctgccatcgacgccccccgcattcaacgcatggcaatgagcgcatgaaatggtgctatccgccgataaacggggatcgtgatacagcgcaaaacccaacgccactttttgcgcatcggtaggcagtttttgcgggatgggctgcaccggttcattgcgatgctccggagcagtatcattgctggcgtaatattccgcgcgctgttttgcaatccaggccagtatttccgcccgctcttcatcactcaccttacccgcccagtgtagcgcggtataacgcgttggcggcatagtttcatactgcatcacccattcaatcttattcagatcgctttgcgaaacgggtttattagccagcagagccgcacgcacggcctcgaggttaaaagatttatatccaagctttatgtcgtaatccatcaactgtttcgcgccgggaatataataataggcaggtaattctgccgaaggcgtatggcaataatcgcatcctttttcgcggagaaagcctaaaaccttattattttcactgacagcagatgcctgaacatcggcctgtttactgcgtttattatcgtggtaccacacataaccagataaccctaaatagcaaatcgcgacgccagccaggccgatcgcggtaatacgtgagaccattttcattattcttccctcacggtagtgagttattgtgacccagaaaattttccagaatgctgcaaacgtctctgcgagacaaagccatcataaaaaacagggagatatgctttttgataggaatcaatcaattacatgaatataaactatcaataagatagccagtgcctattatccagctcaggaatggcatatcatgattgcggcgagagcaggattgaatgttctgaaaatgaaaaacaacacgaaatccgtatttttataaattccattgatattagtgcgttatattttttggcaggttaataaacgtgatccaccgcacgctttgtcgcccaccaggcggagcgaatgactacccttaaagaaaagcccgataattagcgacgaatttcggaggtcggatccttatgctcaatcagaaaattcaaaaccctaatccagacgaactgatgatcgaggtcgatctctgctatgagctggacccgtatgaattaaaactggatgagatgatcgaggcagaaccggaacccgagatgattgaagggctgcccgcctctgatgcgctgacgcctgccgatcgctatctcgaactgttcgagcatgttcagtcggcgaaaattttccccgacagtaaaacctttcccgactgcgcacccaaaatggacccgctggatattttaatccgctaccgtaaagtgcgccgtcatcgtgattttgacttgcgcaagtttgttgaaaaccacttctggctgccggaggtctactccagcgagtatgtatcggacccgcaaaattccctgaaagagcatatcgaccagctgtggccggtgctaacccgtgaaccacaggatcacattccgtggtcttctctgctggcgctgccgcagtcatatattgtcccgggcggccgttttagcgaaacctactattgggattcctatttcaccatgctggggctggcggaaagtggtcgggaagatttgctgaaatgcatggccgataacttcgcctggatgatcgaaaactacggccacatccccaacggcaaccgcacctattatttgagccgctcgcaaccaccggtttttgcgctgatggtggagttgtttgaagaagatggtgtacgcggcgcgcgccgctatctcgaccacctgaaaatggaatatgccttctggatggacggtgcagaatcgttgatccctaatcaggcctatcgccatgttgtgcggatgccggacggctcgctgctcaaccgttactgggacgatcgcgacacgccgcgtgacgaatcctggcttgaggacgttgaaaccgcgaaacattctggtcgcccgcctaacgaggtgtaccgcgatttacgtgcgggggcggcctccggttgggattactcttcccgttggctgcgtgatactggtcgtctggcgagcattcgtaccacccagttcatccccatcgatctgaatgccttcctgtttaaactggagagcgccatcgccaacatctcggcgctgaaaggcgagaaagagacagaagcactgttccgccagaaggccagtgcccgtcgcgatgcggtaaaccgttacctctgggatgatgaaaacggcatctaccgcgattacgactggcgacgcgagcaactggcgctgttttccgctgccgccattgtgccgctctatgtcggtatggcgaaccatgaacaggccgatcgtctggcaaacgccgtgcgcagccggttactgacacctggcgggattctggcaagcgagtacgaaaccggtgaacagtgggataaacccaacggctgggcaccgttacaatggatggcaattcagggatttaagatgtacggcgatgaccttctgggtgatgaaatcgcgcgcaactggctgaagacggtgaatcagttctatctggaacagcacaaactgatcgagaaataccatattgccgatggtgttcctcgcgaaggcggcggtggcgagtatccgttgcaggatgggtttggctggactaacggtgtggtacgccgtttaattggtttgtacggcgaaccataatatttttacagccagccgctaacttcctgctggctgtaaaattatcctcttcaggaggagatatttaacatcattgccgcctgggtgcgatttttgacttccagacggcgatacagtgattccagatgcgcttttaccgttccggtactgatattcagcgccctgccgatctctttatttgattcgcccgccgctaacatggttaaaatctcccgctggcgggcgcttaacgatttgagatctttaatgtccttttccggcgtcgttcgccagtctccaggcagaaacatcatccccatcgccgcactatttaccgccaacgcaaatgtctcgacggttgaatcacgaggcacaatggccagcacattaaaatgaataacttcctgtaaccaccgtttgttgcaatccgtcgccgtaattaacaccttaacctcaggaaattgcaccacggttttttgcagcaaccagtagcaaaactcaccatcctgatcgccatcgagcatcactaaggcttcagggtaactttccagcttttgccataactcgtctgcctgactggccccctgaatactcactcctggaatacgatgctgtaaactgattttcattccatgaataaatattgactgcctgtcaaacatgactatttgcataactgaatctccacctgaatacgttaaaaagacttaagtagtggaagggtattactcgcgagaaaaaataagaattcgccatttggcggtggccattctacagagataacgcgtagaaaatagttaccgatataaatagttacagctaaacgcctgaaattacatgtcgagggcactatttaaaacatttttgaggatttccttatatcggtagttagtacgcatgcaatcaaaaatgaaattccgcgaccataaacaaaaataacaaacggcaatgagataaaaataagcacaaatagccaatacatcttctattcactttaaagtgaatcgctgaaaaatacgctctgtttaagggaattcacctttctcataaagctattcctcccttttcctgctgagaaatcgccacattcatcatgacaacattgtgaaacccggcattagatgttagaaaaaacaataaacaatgcgatatgcgcgctactgtttcgttgtgaacaacaatcggtcaaagagatggataaaattcacgcaatgcagttgttcatcaaagtcgcggagctggaaagtttttcccgcgcagcggatttctttgctttgccaaagggaagtgtttcgcgccagatacaggcactggaacatcaacttggcacccagcttctccagcgcaccacgcgacgggtcaaactcacgccagaaggcatgacctattatcaacgagcaaaagatgtgttgagtaatctcagcgaactggacggtctgtttcaacaggatgccaccagtatcagcggtaaattacgcatcgacatcccgtcaggaatcgcgaaaagcctgttactaccgcgcttgtcggaatttctctatctgcatccgggaattgagctggaactgagtagccatgaccgtccggtagatattcttcatgatggttttgattgcgtgatacgcactggcgcattaccggaagatggcgttatcgcccgttctctcggcaaactggccatggtcaactgtgccagtccacactatctgacgcgctttggttatccgcaaagccccgatgatctgacttcacacgcaatagtgcgttatacaccgcacctgggtgtacatccgttaggttttgaggttgccagcgttaatggcgtccagtggtttaagtctggcggcatgttgacggtaaacagtagcgaaaactatctcgccgccggtattgccggtctggggattattcagatcccgcgcattgccgtgcgcgaagccctgcgtgccgggcggcttattgaagtgttgcctggctaccgtgccgagccgctgtccctttcactggtttatccgcagcgtcgggagctttcccggcgtgtaaacctgtttatgcagtggctggctggcgtaatgaaagagcacctggactgaccgactatactttttaagaataaccacgacagaaggacaaaagagcggatgacgcaggaaaacgagatcaaacgtcccacccaggatctggagcacgagccgattaagcagttggataatagcgagaaaggcggcaaagttagccaggcgctggaaaccgtcaccaccactgccgagaaagtccaacgccaaccggttattgcgcacctgattcgcgcgacagaacgctttaacgatcggctgggtaaccagtttggggcggctatcacctatttctcatttttgtcgatgatccccattttgatggtgtcgtttgccgcagggggctttgtgctggcctcccatccgatgttgctacaggatatcttcgacaaaattctgcaaaacattagcgatccgacgctagccgccacgttgaaaaacaccatcaacaccgccgttcagcagcgtacgactgtagggcttgtcggtctggcagtggcgctttattccggcatcaactggatgggtaacctgcgtgaagcgattcgcgcccagtcacgcgatgtctgggaacgctcgccgcaagatcaggagaagttctgggtaaaatatctgcgtgattttatttcgctgattggtttgttgattgcgctgattgtgacgctttctatcacctcggttgccggttctgcgcagcaaatgattattagcgccctgcacctgaacagcattgagtggctgaaaccgacatggcggttgattggcctggcgatttccatcttcgccaactatctgcttttcttctggatcttctggcggttgccgcgccaccgtccgcgcaaaaaagccctgatccgcggaacatttctggctgctattggttttgaagtgattaaaatcgtgatgacctacaccctgccatcgttgatgaaatcaccctctggcgcagcatttggttccgtgctggggctgatggcatttttctacttcttcgcccgtttgacgctgttttgcgcggcgtggattgccaccgccgaatataaagacgacccgcgaatgccggggaaaacgcagccttaaaataggccggatgcggcgtacgaatttattcggcctggctccccgtaggccggataagatgcgccagcatcgcatccggctataatgcacacataacctcttgaaactctttcccagagcctctttagccatctattcaggagcaaacaatttcattccaacttataaccccagcatataaatccagttggtaacttttatttaacctaaaaccagtttaatccaccatttataaaattatgtgaagcatttcatagaagaaaaatcactggcctaaacattatcccctttttgcctgatttttgaccatttccgcgatttgttacacattgaaatatcacttttgctgtgcgtaatatggctattcgttagccaaaaaataagaaaagattatgcaagcaacagccacaacactcgaccacgagcaagaatacacgccgatcaactcgcgtaataaagtccttgtcgcctctctcattggcacggccattgagttcttcgacttttacatttacgccactgcggccgttattgtgtttccgcatatcttcttcccgcagggcgatccaacggcagcaacgctacagtcgctcgccacctttgccatcgccttcgtcgcgcgccccattggctctgccgtttttggtcattttggcgatcgcgttgggcgtaaagcgacgctggtcgcctcgttgctaacgatggggatttcgaccgtggtgattggcctgctgccaggctatgccacgattggtattttcgccccgctgctgctggcgctggctcgatttggtcagggtctgggcttaggtggtgaatggggcggcgcggcgctgctggcgactgaaaacgccccaccgcgcaaacgtgcattgtacggctccttcccgcagctgggcgcaccgattggcttcttctttgccaacggcactttcttgctgctttcctggctactgaccgacgagcagtttatgagctggggctggcgtgtgccatttatcttctcggcggtgctggtcattatcggcctgtatgttcgcgtgtcgctgcatgagtcgccggtgtttgagaaagtcgctaaagcgaaaaaacaggtgaagatcccgctgggtacgctgctgaccaaacatgttcgcgtaaccgtactgggtacgttcattatgctggcaacctatacgctgttttacatcatgacggtctactctatgacctttagtaccgccgccgcgccagttgggcttggcctgccgcgtaacgaagtgttgtggatgctgatgatggcagttattggttttggcgtgatggtgcccgtcgccggattactggctgatgcctttggtcgccgtaaaagcatggtaatcatcaccacgctgatcatcctgttcgcgctattcgcctttaaccctttgctcggttctggcaacccgattctggtttttgccttcctgctgctggggttaagtctgatggggctgaccttcggtccgatgggcgcgctgttaccagagctgttcccgacagaagtgcgttacaccggagcatcgttctcttacaacgtatcgtcgattctcggggcttccgttgcgccatatatcgcagcctggttgcagactaactacgggttaggtgcggtggggctatatctggcggcgatggctggcttgacgttaatcgccctgctgctgacccatgagacgcgacatcagtcgttgtaatcagagtgaaaagcctgatgcgctacgcttatcaggccagaatttccatacaatatattgaattagcaaggatttgtaagccggaggcgttcacgccgcatccggcatgaacaaagcacactttgccaacaatctaaatctgtttaattgccggatgtcagacatccggcaattatcatcacttcttcatctgcgacaaaattgtcctgcactgattagcctccccttcggaaggtgagatcagcgccagtaacgccgccgccggtgttaccagcgttgccagtgccgccgcaacggctccgcgagcaatcaacggcccggctttcaccccagcctgcggatttttaaacgtcccacgcacatacagcggcgaacgcagtgtgataatccgaatccctttactctccggatcaatagtcaaatccagctgttccgaagcaaaacttgccgtgccggtaacgttaatcaacgcgttctcagtatcgaaagcaaaaacctgcggacgcgccacaccgttggcaatatccagattcgctgccgcgcagttcacccgcacctcatcgtcaccaaatatcgcaccgacaatgtagttgccgacattcagcccaacaatctccatcaggttgcggctcaccagcccgtcattcatcaacagtttcaggttgccgttactgttgcctaaaagcgccgccaccgagttaccgctaccgcgcagttccgcgtcaccgttcatttcccccagcgtcttctgcatcagttccacatccggcatcagttctttcagtttcagccgacgggcctgaatatctgcccgcccttgcatcggctttttatcgccttccagatgaatattcgccgcaatgctgccgcccgccatgccaaatttcagcggttgcaggcgcaggtcagcatttttgaggatgatatgagtagaaagatcgctaatcggcaggctgctgccatgctcaatgcgccgccctttgaagcgaacatcggcatccataacgtcccatttatcggtttcgaagcggtcataaggcagcactttgcccgcaggctgaacgcttttttcgcccttcttctgttcagaccgtttcgacttttctgcccctttcccggaatcaacgccaatcaacggtcccaggtccgccagccgcaattgccgcgactcgacatcaccttccagttttggtcgtggcttgccggtggtatagatcagagaaccgtggatatcgctatcgccaatgcgcccattaaaaccgcgataatcaaagaccgacgatttttcagtgtcgattttcgctaccagccgaccatccgtttcaaacggcggtgtatcgggcagcagaacgcccgtcagttcatagagatcacccagcgaatcgccagaaaatttaagccgtaaatcgacaccccccatcttcattgggtcattcacaacgccatcaaaagcaacacgggtgttaccagagcggaaatcagcctgtaccggaaacggcgttccttcgccacgcagcgccagcataccgcctatttttcccgtaccagtgagcggttcaccgttataacgtccctgcgccttcaggccaaaaacgtaatcgcccaccttttctttatccgctttacctttcgatccggtaacttcgctgaacggcagcggcttgcctaacggatcgacaaaaatttccagatccgctttgcttactttgtcatcaatggcgatccgcccttgatcgaaaagaatattatccagctgaaacgaccacgccgacggctttgcattcgcgtctttgttgtcatcgttggcgagattaaacgtccagttattgttcttttcggagaggcgaatcaggcgcgcgtcgggcttttcgagcttgatccacggcaaccagaccgttttggtcagcagcgccagcggggccagcgtcgcttctactcgcggcaaatgcaccattgtgacttcgggaatatccggtggattgccaagaatgatgtcttccgcgtgtacatggggccacggcacccagctgcgccagccagtttcttgtttttgccgctcccacaccacgcccagatcgccacggatagcgaacggacgattcaactccgcagagactttctggttgatggtcggtttgagtcgattccagtcaaaagttgcaatcaaaatgatcgccacgacaatcaacaacaagaaagcccctgaaatcgcagcggttattttgcctgccttgctcatcgttcgcttcctcatattcttcctgtgccagtcctaaagatagtccagccaggcggaaaatgaggcagcttatagcgccagaaccgccgtattcagcgtttctatcggtgccgggcgtgaaagaaaccagccttgtgcggcgaatgcgggcgagttctgaacatcacgccactcttctggtgtttctacgccctcgacaatcaccccgcgacaatagcgattcattagatgtaaaagctgagaaaagagtgtgcgtccttccggtgactgacgcagcatcacaaacagttctcgcgcgattttgatgtagtcataacgcacttcacttagtgcagagaaatttgccatcccggtaccaaaatcatccagccacagcgggccaaattcacacatcgaggcaaaggttgaatctttcggcaggcggatgtgttccaccagttcgaaacgcagccagggaagacgctcaatctggcgcaggatttttggttgctgacgcagggcgatgagcgtagggccatcaatattgaccgatgccagcaggccgtgctctacaaagaagtcggctttttgcgccagcaaatcaatctgctctttcacaacctccatccgatggctaacggtgatttcagtaaaatagcgatccggcggcaggcgttgcgaagggttcaagggatgcgtgaccaccgttaatagctccacggccattaaccgcccgcatgtttgatagatcggctgccaggtgtaagcacgctcacactgcaaccaaaaacgccgttcctgcaagctctcgatgcttgcttcagggttgcttattcgctggataacctgccttatcatcaaagatgtcctgtgtttaaaagtgatgctgcccggactcgacaaagattatcggcgcgcaaaggcagaactttaccgcctggccggggtaaatttccccactccacaatggaatctttcaggaatacgttctggctcaaaaaaataatggaacactgttttaatatggttgaccagcaaaccaccacagcgcaaactaacgctaattttttacagatcaggttcacgactatgtccaaaaagattgccgtgattggcgaatgcatgattgagctttccgagaaaggcgcggacgttaagcgcggtttcggcggcgataccctgaacacttccgtctatatcgcccgtcaggtcgatcctgcggcattaaccgttcattacgtaacggcgctgggaacggacagttttagccagcagatgctggacgcctggcgcggcgagaacgttgatacttccctgacccaacggatggaaaaccgtctgccgggcctttactacattgaaaccgacagcaccggcgaacgtacgttctactactggcgtaacgaagccgccgccaaattctggctggagagtgagcaatccgcggcgatttgcgaagagctggcgaatttcgattatctctacctgagcgggattagcctggcgatcttaagcccgaccagccgcgaaaagctgctttccctgctgcgcgaatgccgcgccaacggcggaaaagtgattttcgacaataactatcgtccgcgcctgtgggccagcaaagaagagacacagcaggtgtaccaacaaatgctggaatgcacggatatcgccttcctgacgctggacgatgaagacgcgctgtggggtcaacagccggtggaagacgtcattgcgcgcacccataacgcgggcgtgaaagaagtggtggtgaaacgcggggcggattcttgcctggtgtccattgctggcgaagggttagtggatgttccggcggtaaaactgccgaaagaaaaagtgatcgataccaccgcagctggcgactctttcagtgccggttatctggcggtacgtttgacgggcggaattgcggaagacgcagcgaaacgcgggcacctgaccgcaagtaccgttattcagtatcgcggcgcgattatcccgcgtgaagcgatgccagcgtaaaagcagcatatgcaaaaggctggatagagtgttacccccctatccagctcatccataaatacctgatggttgtgctaactcatcaccatcaggcattactgtacaggtggaatatccgtcacttcaggatgtacgtcatccgtggcgacagatgtggcggcagccgcagtcgatggggccatgatttgatcccaggccgcctgcaacgctttcatgttaaattccggctcgcctttcggctgcagcagtattaacgccatatcattcgacaactgctgacgcagatcctgatttaacatctccaccgtcaggctgttaaggaaatcctgacgcagtttctgatattgctccggcgcgatatcgacgacctgattttgcaacgaacgcatccgctgccccatcagaatatcggtatcagctcgcgcataggcggcaaacagtttctgcagctccagtttcttttgcgccactaacgcattgaactcttcttccggcagacctttatcgcgaaccttcgccagttcacgcgccaccagattaaggttgctgttcagcttgtcgtttggtgattcgatgttgatggcacactgcgcacgcagatacagcacacgacagtcaaatccaagaccgatgtctttactgttactggcgcttaacgcttgctgaacatgccagaacagcgcctcacgggccaggtccgcacgccagtagcgcagcagtgcggctgattcacgaatcggctgccacggcgtatcccacatgatagatagccggtcctgacgcaccgcgtcggtcataatactcaccgcttccgcacgcagcggagaaagcgtcggcaccggagccggtgtttcacgtttgcctttcagttcgccaaacgttttattgatttggtcgacgaccgagcgcgcatccacgtttcccaccaccagcagcgtcattgcatccggggtgtaccatttctgatagaaatctttaatcttttccgcttcaacgggttgtttcagcggatcggcaggatcgtgacctaacaaggttgatcctttcagacgataacgccaccagccctctttagtatcggcaggccaggttgccaccatgtcctgactttgcaacgcatggttgatggtttctggcgtgatagtcagtttgccagtggcatttgccagataagagagcgcctctttcagcaagtcgttacggttattgggcaaactcagattaaacagcgtggtgtcataagagacaattaccggcggcatcgggcgtttagggtcgatcccctgctgccacaatgaacgcgcctgcgctgcgtcaaggccaccgctttgcgttagcgcaatacgagggatggcgtgactgtaaccgctctgttgtgtactttcggcgagcgaaccggtattaaccagcaggcgaatttcaacacgatcgctgggacgttggggcgtagtcagcacttgccactgtaaaccgttggaaagcgtcccctgttgccatgctggatcaggctggagcgcatctgcctgcacatagccagcagtggccatcatcagcaaaccgcccgctaaaagtcgaatttttgtgccctgcatgtgaacccctgatcaactatcctggtaataaaaaactgcccgttgtcggtcagtctaaatgacgttaaaaacacttcgtgttagaccgcaagaacatgaaaatgtcacggaagaagtgaaataaacctgaactcacccaggtggtaagttcaggcacaggggtcaattatgcgcaaacacccgcactcggggaagggagtgcgggcataagtggtgagattaagaggataattcgtgcgttttgccatccggcgcacgattattcagcacatcgtccagttttttgtggtccagttctttcacccacttagcaacgacaatggtcgctacgccgttaccgaccaggttagtcagcgcacgagcttctgacataaagcggtcgataccgaggatcagcgccagacccgctacaggcaaatggcccaccgcagagagcgtcgccgccagcacgataaaaccactacccgttacccctgccgcccctttagaagaaagcagcaacacgattaacagcgtgatttggtggacgatatccatctgactgttagtggcctgggcgataaacaccgccgccattgtcaggtatatcgatgtgccatcaaggttaaacgagtagcctgtcgggatgaccagccccaccaccgatttgcggcagccgagtttctccatcttgtctagcatacgcggcagcgccgactcggaagatgaagtccccagtacaatcagcagttcttcacggatgtaacggataaatttgaagatactgaaaccagtcgctttagcgattgaacccaataccagcaccacaaacaggatacaggtgatgtagaaacagataatcagctgccccagttgcaccagtgtgccgacgccgtatttaccgatggtaaacgccattgccccgaacgcaccaataggtgccagacgcatgatcatattgatgatgccgaaaatgacctgcgagaaactttcgatcacgttaaaaatcagttggcctttgctgcccagacggtggagcgcaaaaccaaacagtacggcaaacagcagtacctgcagaatgttaccgctggcaaatgcgccaatgacgctcgccgggatgacatccataatgaaggcgacaatgccctggtctttcgcctgatcggcgtaaaccgctaccgctttcgcatcaagcgttgccggatcgacgttcattccggcaccaggctgcacgacgttaacgatgataagaccaataatcagcgcgatggtactgacaatttcaaagtaaagcagtgcgactgcgccggtacgaccgaccgccttcatgctttccatgcccgcaatgcccgttacgacggtacaaaagatgacaggagcgatgatcatcttaatgagcttaacgaagccgtcgccaagcggtttcatttgctcgcctatttcaggatagaaatggccaaggagaataccaatggctatcgctgtcaggacctgaaagtaaaggcttttaaacagagaggttttcatagggtgtcctttagtaaaaccacaggtcttgtaaggttatggggtacctgcggccttaaaataacacccagacaacatcacagaaatgtacctggatcataattgaaacaaaaaggttaaaaagtttgagctggctcgcacaaaccagcactttttaaagttttgtaatcagtttggggtagctacttttcttccaggtaactctcttcgaagatttcaatagggagtgggcgagcaaaaaggaagccctgggcaataccaacgcccgcttttgccagccagtcgcgttgtgcttcagtctccacgccttcggcaatcatttgtaagttcaggctctgcgccagcatgataattgcagcaatcatgctgctatcttccggcaaaccttcaacaaacattttgtcgattttcagtacgtcgattggcaacgatttcatatgctgcagctgacgcagccctgcgtagcccatgccgaaatcatccagcgccacccgaactccggcattgcgcagcggacggaggattgccaccgcagcatgaggatcgtcaatacgtcggctttctgtcacttccagaatcagtgttcccggctgaatgcgatagcgggttaacagttccagcatatccgccaccatatttggatgcatcagttgcagcgctgagaggtttaccgacaagggcagcataatgccgcgctcttgccaggcagcaagcaatcgacaggactcttccagcacccagtgaccgacggtaaccatcagcccacagcactcaatgcgatcgattaagccatcgggcaggtcccaactgccatccggttgctggatacgcagtaacacttccgcactgaccagtttaccgctggtcatctcgacctgtggctgtaaccaaatcgcaaactgatgattttccagtgcattaaggatatcgctctcttccgtcaaccgcttctgggcggcttccatctgctgcagatcaaagaactgaatctgatttttgcctttatggcgagcggtaaatgccgcagaaatagcgcgactgtaaagctgttcggcggtgagatcgccgtagaacatcgccacgccaatgctacagtgcggacggagttgaatacgttcaatcggcaggcgctcgctaatgatagtgagcacttgctgacctaatgtgatagcgtgccacggttcctgtacaccgttggcaatgacagcaaagtcataaccgctaatctgcgcgaggatcatgcgtggcgacagtaccgatttgagtttttccaccagcgtcagcagcagaatttctcgttgcgcctctttcagcacacccgcagtatcacgcagggtttcacaggtgatgatcatcagcgcggtagtttgtttacgcgccaccacctgctccagcatctccatcagcaaggctttgttcggcaaatccgacaccgggaagcgcatcgcattttcgttctgttcttcataatggcgctgcagcaattgctggttgaggttgtaactgcgcaccaacataccgatttcatcgtcctgatgcagacgcggtaatgccagttggtgaccaacaagctcctggggtgggatggcgttaagttcgcgagcaatattgcgtaacggatgcaaaatcaggcggttaatgcaccagctaatcgccaccgtcaatattaacgacaaaagtaagtaaatggtcactaacgttgagagggtgctcatcacgaacttatacatgcggaaggaatccgcctgtaacaccagataggcaattggctgcgggtttgccggacgttccagcgagtaaacgcccagcgagatttgcaccggtagctcaaacaggcgagtaaccattaccggcaccggacgctctggaataaaacttttacgcagcgcctggaactggttgggcagcactacatcggcacggctgaccacgccggccggtttaatgctggcaagaatagcttccgcttcgggaatatcgcctttcaaaatggcagaagataagggttcgcggacagagcgagcaatgctttccagttgcgtagccgtgttatagcgattctgctggaccagatggaacagcaaaacggtgcaaaaaataaaaacgaacaccaggacaacggctgccaccattgccatctgcttgattgttaacgagcgacttacgcgcaaattgtctccccccggaaatcccagattgccgcccgagtatacccgatcgcagcggcattaagagaggcgctatctgaaaacttaccagtcggcgtaaggtatcagcggctgcggcggtaaatccatgtcaccctgccatccggcggcggaataacgtacgtagagcaggaaatggctgggtgcgtaatcttttgcctgctggatatcaattgccgtgccgacaaaccagttggaagtaacacgtcgttcaagtaatgcccgcgccgtgtagccaaagccctgactgctgccgccatcgttggattgccgcgcagcttcttcctgccagtcggtcgggatcagattcatcagcggataacgcggcatggttttggtgcgtgaatgcgaccacgagccagacgcccccagctcccacgaccagttttccgtgcgctcccgccacatcaccggtatggcaaacgacaggtattcctgcggactgtagtaaccgccctgaccgagtgagtagccactcaggtctttgtcataatgccagatcatgttgttcaggccgattgtgacgcggcgattgttctggttgatgaccttatagtaatagcccgtcatccagcgcacacgccagttatcttcgacatttttaccggttaactgatcaccgctaagcgatgcccagacgccgtttgcttcacctttatcgtaactcagacttagccccacgccgtcggcacgcacgccgccccattttttcccggtattgctcggagagtctttttgcccaccaaaggccagcaaagaactggagatgggccgacggtgggcgttaacggtgtaacccagcggcccgatatcatcgctgtaactgatgccgccgaccacatccaccacgttgaagcccatcggcgtggtaccgatatcccagctccagacgtcatttcgccagccgaccgccacgctggcaccggaatccgactggctgcggttgccgctacagtcctgtaatgtacaggtgccccagttgtcatcccatttgccatcggcattagtggagaaactgccgacgttcatattgacgaaatcactgcgaaagaacatccgcccgtcagaatagggcgcgtccacctgcaacatagtggtgtgcgctttcagatcggagtaaccaccggtaccgctcgaaccccagtaatcgtgctcgagagtgacgttaagatcctgctggcgatagaggtccgccgtatcgctgcgcacgccgcgtttcagccagtcatctttctcgtcgttacgggtcagccgggtaaaggtgtcgttatcctgcggacgcgtcgtggtcacaccggatgcaaccatagcgtctttgtaggtttccagcgcctgcgttggatcgcccgccagcgcttcaaacttcgcaccatcacgcagtaccatcgcgctttccatcgacggtggctgagattttgcctgcgggatcaacttattaaatgtctgctgcgccgctgcggtatcgccaagctgcgcctgtgccagcgccacgcgccgctgtgtgttcagcgaggcgttatcaatggcaggcagtttcgccagctggctacgtgccgccgctttgtcaccggcagcaatatccacttccgtcagaccaagaatggcatcggcgttagttggctcccgcgtcaggacattctgatatgcagcgcgggcggcggtgtaatcacgtcgctgctgcgcccagtcagccagcgtgaggtcaatacgcgaggaaggcggttgctggcgcagcatcgcttccgcttctgcctctttaccgttttctcgcaggcgattagcggtttccagcacctgatcgttttgcagtcgattaaccagctcctgaatattgctgttccactgcccgcgcggcaggctgttgatatgcgccaacgccgctctgtcctggtcgtgaccggagaggtacagcccgtaagcgtaaacctgctccgggtcgttcggcttctgctgcgccagattgcgcattaacgtatcggcctggctgcgttgtccggcctgccagagatcctgcgaaagtcggtaagtaatccatacactgccggggtccagcgccagtcgttgccgctgaagtgctgccgcctgcgcccatttcccctggttttccagtgcctctgcctgctgtgccagacggtcgttttgcaggctgcgttcgatatcatcaatgctgcgccgctggctggcagagagcgaggcgatatacgcttcggctttttctggcgactgctggcggtaaatattcgccagcccgcgcacggcgttagtgttgccgctgtccatacgcaaggtctgctggtaatagcgttcggcggcgggataatctttgcgcgccatcgccacatcgcccagcccaagcactgcatagctgtcggtgttatcgacattacgtgcctgctggaacagccgttctgccgggtcaggattattggctttcagcgcggcatcgccctgctggatcgccagccagtagcggtttactttcagcagactgttccatttgtcgttattgctgttgtgcggatccagcgcgagggctttttccagattcgccaccgcattagcgcgatcgcctttctgagaatacgcctggcccagcgcccccagagcctcactgtctttcgggttcgcccgcaccgcctgttgtagttcgggaatggctttacccgccatgccagagtccaccgccgctaaaccttgcgcacgagcgcggaaagcagggtcggccagctgtttttgctgttctgccagttgcgattgtgcagcagctacgctatcgccatcgctaaagatcgagagatattttttcagtgcctgaacgctggcatcgctgacaggcatgtctttaatctgcccgtaccagattttagaggccccttcgcgcccggcgttcgatttcgccatctgttccaggacggcaaaaccttcatcacggcgatcgctactaaacagtaatagcgccagattgttttgcaggcccgtgttgcccggcgtatccgcattaatgcgttttagctgattaatcgcttcgccacggcgggccggaattttcgccaccgtactccagtactcgacagcaatgtcaccttccggcggcgcaccgttgaacagtttgttgtaactcgccacagcttcttccgcatgaccagtcgtcgcctgcaatcttgcctgttgcagtgcctgacgaccatccgacgtggaaagcagcatcgtagtccgtgacgatttatacgcatttgaactcggcgctaactgcgacagccgatcgagctgtttttgtgcgccatcaatatcgccctgacgtaacagagaacgaaaacgggcagcaatcacatccgggttattcggatcaataagttccagccgatacaacgactgttgcaccaggtcttcacgatgggtcgcttcgcctaaccgaacttgctccagcaactgttgctgagcggttggtgctgcctcgaccatcggcatgacggccagaccgagggaaagcgtgaatatgtttagtgtgaatttgcgcattcctggccccagtcaggtaataactcaccttttgtcgagaagcggaaacggtgttgatcccagccttgtccaaacagggtcagcacatagttgtaataggcatcgctgccgggaaagttatcggccacgcgctggcgctgaacggcctgcgcatcgcggttttgtaaaaagggcagcatggcggcagaaaaaccgaccggtcctttaccctgcgctttccccgtagccacatccactttttccggcggataaccgtttttctcagtgaatgtcgccatcggtttaaaccggttgagcatccgcgctttttgcggatcgctgtcaggcatcatgcctacccacatgtaaacgcggatagcgtcgtagctgctgatcaatgttttttcggcttttagctgccagcctttgtctttctcatagcgcacccagtctggcgaaaagcctttcggggcggtttccagcaataaacgttgattggtttcgcgcagcgtggtccacggcgcgccaaagcgggtgaaatactgcgccagcgtcggcggcaggtagctggggttaaaacgccagctgttatcctcagcaaaacccactttgcccggtaacaacatggagcccagcccaggcaccgtcaccacttcctcccgcgcgatacgttttagcaatgcgctgccgatgtcggtataacgctgctctttccacaaacgccccgcctccagcaacgaccaggccatccagacatcaccatcggaggccgaattgctgtccagcacttcccacttactgttctctttcttgccccacagccaggcgggcaaatgttcttttaaagaaccctgagcgagattgttctgcgtccagtcgagaagattatcgaaagctgcacggtcgttagccgccagggcaaagaacatgccgtaactttgcccttcggaggtggtgattttacgcgcgtcgctggggtcgatgacgcgcccttcctgactgatgtaatcctttttaaactgctcccaggcaggccaggtacaggctgcctgaacactaaaggcagccagcagcagcatcgtcacgagtccactacgcaacacattcatcttcaattactcgttatccgggttaagacgacgacgactaataatacgcagcagacgccacagtacccacgccagcaatatcacactgatagccgccagcaccgccagcagaatcggatggtttgccagcgcataccacaagcgctcgaaccacggcagatgacctacgtaataaacatcgccaacacgtaggctgttgataccggactcgcggatcaccgcgaccgaaccgaacatggtggcgcgtttgccgctatcgttcaccgcatcgttaagcatttcataaccgcgtgggctatctgccagcagcgcaatcacgctgcgctggtcgttatacggcgactggaagccaatcaccgccgccatcgcaccggaagaggtcagcgttgactgggtttctgccgcgcgatcgctctcgtccggcacaataccggggaacggggtctggcgcatcggcgtttttacccagctttcggtagcctgcaccaacaggtcgatctgcttgtcatctttcagtttgtccgggataccaccgacgatcatgatgtcggcatctttgccctgaatggtgctgccatcatcggtcaccgtcaggttaatcgccgggaagcccgtctgcgcaccgataaagccaacggtattcagcaaggtttccatctgtgcttcgtttggcgttttcggcatcacggtgatggtttgcgacaaatccgccatccggctgaacgggaagcccgcgttagcaaaggcgcgtagatccggcatcgggatgaagtggtaatacttcgagaagtcgatggtggagtcgtcaccaatcaccacatgattctgcaccggctggaaggtaatgcagttatccaccgaaccgcccggcatcgggttcatatactcaaagtcgaaccgcagctggttggtcgcgcccagtttcagcgctggaatagagacatccgttttgccatccagcaaaccttgtaataccggaatccgcagcagcaggcggttcgcctcctgtttgctgctcaggttgaaggattgcaggaactggttattcaggctgatatccatccgcgaactgtctttcaccggcggcatggtgtagcggtaattaatatccatatcaatgccggtactgcgcatcaggtagagatccggcggcaggtttagcgaaacgttaatcgctgctggctcaagaccgctggattgtaattgttcttcataggttttcagttcaccaaaggtgaccggacgatcggtacgcacccagttcggcgcatcgtacggtttacgcggtagcagcggtttcacttcattcactaccacactttcaccacggaacagaatgttaccctgagcgatacctttcgctgcctgcaacaagtctttgtcgtcacgaccaaacaccaccagcagtttgacgtaaggattctgcggatggttaatcatctcaatcaccggggcttttaccgccggatgatcgcgcaggaagtccgggcgtttgtcattggtggcaaagacaatggcattgcgatccggcagttggttatagagcaccgggaagttctgcccacgccagccagaacgcgaaccaaaccacgaggcgacaatggcagatgcttgttgcagctcaacatccggcgcacccgcaaagaccatcggcaaggtgttggtgcggttatcacgcgggtcaaagaatggcaccgggaagtgtgacaggtcattcttcacattcagggtctgataggtcagatccagtccactgctccgcccaacatccagccaaagcgtggtgctggccgggttttcgcacacgtcctgataatggccgacaaactccagccgcacacggttgaaatcagtaataaacagcgggttaatgggcatttgtgccagcgtttttttacccaactgttctttggtcactggcagcacgcccatcagttcatcattgagataaacctttaactgcgactggacaggcagtaatgatggcgatggcgtgtattcgaggttgagcatcgccttcgtcaccacttcatcgctgcgcataccaaactcaatgctgccgttcgggttaatgccacgtagcaccatgctgcccggcggcggcgcaatttgcgcaaaggtcagcttcacatcacgggaaggaccgttctgcgccacgactggcgcatctgcgccctgcacgcccggcatcacttgccccacctgcggattttgctccgcctgggcggctacagctggctcagcattgatcagtggttgcgttgctggcgtcgcctgcgtcatgaaagaggggaacgcactcatccccagagccactgcacaaatccagaatatttttcttttcatcgcgttatcatcattgttgagccaaagcctgatccgatggttgtgccgtttcgctccgctccgggcggcgcggaataaacgatacaacccaggaaaccagagaagtcagcacacggaatatgcccttcaccgaagaaggcgcaaattccgccagatggcggtagccacggaagccgagcttcagaatatccagcagactttccagcggcttatcttccgggtagctgtcctgccagagcgcccatgtatccgcacgggcaaacgtacactgcacaaaatcgatatgttgctgggtagtgagcggcattaatttcagcccaacttcattacccatcacgcgcgccacctgagccgggaagacgtattcctgctgaccgcgtttaagcaacagattcactttctgcccttccagaatctgcgcctgaccgttgatcttgatccccaaaccaccgtcggagaaatcctgaacggtacacgagaagaggtgaccatcttcgcgggcaattgctgcgggcatcgtcatctccacgcggtgcgatcggcgtacctgtttgctttctaccgatactgcgactgcgccgccgagaataatcaggttgtagaatacccacaccatactgacgaccacggtgagcatctcggttggcggaccatagaagtagcgccagatcccaaccgctacgcccaccaggttgagcagaacaaggaagatgtagggccgcgagatcacccagtcgacgtactcttcttccaccagtccacctttggcggtgacgttaaatttgcctttgtgcgggttaatcagcgccaccagcgtcggtggtgcgatataccacgccagcaccgtttcgtagatttcactccagaaagagtggcgatatttgccctggatcttcgagttagtcaggctggcatggatcatatgcggtagcacaaacagggcgatcatcaacgctggcgcgtagatgatgtaggcatgaaacagcaggaacgccagcggcgcagtcaggaagatcagccgtggaatgcccgacaagaagtggaacatggcgttgacatagcacagtcgctgagcaaacttcagccctttaccggtgagcgggttatcgagacggaagatttgcaccatcccgcgcgcccagcgaatacgctgaccgatatgcgccgagagactttcggtcgccagccccgctgcctgcggaatacgcatatacgcggaggtgtagccacgacggtgcagacgcagagaagtgtgcgcatcttcggttaccgtttcgacagcaataccgccaatctcatccagcggcttacggcgaatcaccgcacatgagccgcagaagaaagtggcatcccacatatcattgccgtcctgcaccagaccatagaacagcgtgccttcgttcggtgttttacggaaacgccccaggttgcgttcaaacggatccggcgagaagaagtggtgcggcgtctgcatcatcgccagctgtttctctttcaggaaccagcccatggtcatttgcaggaacgatcgcgttggtacgtggtcgcagtcgaatatcgacacgaactcgcctttggcatatttcagcgcattgttgatgttgcccgctttcgcatgttcatgagtggtacgggcgatatatttcacccccacgttttgcgcaaactggcgaaactcttccctgccgccgtcatcgaggatccagatgttcagcttgtctttcggccagtcgatacccagcgaagcgtaaatggtatttttcaccacgttgagatcttcgttgtaagtcgggacaaagatatccaccgacggccacagcgacatatctttcggcaatggcaccggctgacgattcagaggccatacgacctggaaatagccgagcaccagcacaatccacgcgtacgtttcagcgaagagtagaataagcccgcacaccaggctgaccggatcgtcccagtttaacgtcgaggtgtaacgccaccagatataacggcaagaaacggtcagcgacagcacaatcagcatcagcgccgagaagcgccccggcatccgccgtacgatcagcgctaccccccacagcagcatcaggaagataaactgcgctagcgggttaaacggctgagtaacgcagattaacgccagaatcagcgagaaggtgacgatgataccaaggatcaaccgccgcgccccggcactcaaatgaccgagctcttttttctcatcaagatgctgtgttttatggctaacgcgctcaggcagctcgttcatccattgatggtaacgtccacgaatattttgtagacctgaaaatgcccgcctgcgcggtttcggcgtttctttgcgcgatgcaccgatcagtaaccagcatgtttgaataagataacggaccgggtccagcggacgcggacgcgaggcgttgatatgcggatacaggtttttatgttctgcgcgaatacgctgccagcgcgggtgctccagcggaataaaaatccaggccaggatcatccagaaacagccgagcgtcgcgctgaaagccgacgcgccgtgacgacgataatcgcgataacgcccgataagccgtgcgttgaccggcgggataagcaaccaccgggtcaggatactcatgatgcactcccgactggcgttttcagcccggaatagtttaacaggcaccagttagccagcgtcagtatttcttcagccgccagcgcatcactgcgaaattcaccgactggttgcttagctgccagacattcagccatcgcttcatcacgatgaatgagcatcggcagcaatcggcgctggctttgcaaccaaagctggtaaatatcgtcctgaacctggctgccaatacggaagtcattaatcaaaatatgtgcaccatccggcagcgcttgctgatgcagtcggatatggcagttggcatccacattgacgattgccagcgagtgatcgcacaaactcagcagctggtgggttatctgcgaggcatcacgcggtaagtcaattaaaatccactggtaacgcccgctggcttttagttgctgtaagccggagcaaatatcgctcagccgggtttgccagtgctgtggattttcttgttcttcaatggataactgaccaaaaggcagcaaatcgagctgcgaggtatagcgtaacccggcgtcacgccagtcctggccatccagcatagctctggcccaaccctgacggtgggtaaaatcaacgttaaatgacaggcgcaacaagttgtccgggcaggcatcgaccaccaggacattttctcccaacatttgtaatgaccaggctaatgcggcggtgatggttgttgtccccacgcctccccgaaccccctgcaatcccagtacggccattcaccaatcccctacttttgttgcgcaaactctgccagcaacggccagcgttttaatgccgcggccaactgttcgcgttgggaaatatcggcataatcaatatcaggcagtgaaaatgcctgctttaacgccaaaatatcattctggaagatatagcctatcgcgggatcaggcagagtatctggttcattgttattcatttttcttgatccctatgaaataaccgtaccgttcatgagacaattctaactgtgagcatttcgtcggtttattgtttacggcgagacgggaatgtgctcactttttgactttccgttacgcaacagaaaaagttaaaaacgaaaagactaaaatcacatgtcttgtgacctgctaaattgattcacatgctaaatctgataagttttaatttcaatggtaggtttatttcttagctttcgctagtaaactgataatcagacaaaatgttgacatgagggacattgtggaccctgtattctctatcggtatctcatcattatgggatgagctgcgacatatgccagcaggcggcgtctggtggtttaacgtcgatcgccatgaagatgctatcagtctggcgaatcaaacaattgcatcccaggctgaaaccgcacacgtcgcggtcattagcatggacagcgatccagcgaaaatctttcaattagatgattctcaagggccgggaaaaataacattattttcaatgctaaatcatgaaaaaggtctatactatttggcccgtgatttgcagtgttctattgatccccataattacctttttattcttgtttgcgcaaataacgcatggcaaaacattcctgccgagcggcttcgctcatggttggataaaatgaataaatggagccggctaaaccattgttcgcttttggtaattaattccggaaataataacgataaacaattttcattgttacttgaggaataccgttcactttttggtcttgccagtttgcgttttcagggcgaccaacatttgctggatattgctttctggtgcaacgaaaaaggggtcagcgcccgtcagcagcttagcgttcagcaacaaaatggttgctggacattagttcaacaccaggaggcggaaatccaaccacgcagcgacgaaaaacgcattctgagtaatgttgctgtactggagggtgctccgccgctatcggaacactggcaactgttcaacaataacgaagtcctgttcaatgaagcccgtaccgctcaggcggcgacggtggtcttttctttacagcaaaatgcacaaatcgagccactggcccgcagcattcatactctgcgtcgccagcgcggtagtgcgatgaaaatcctcgtacgggaaaataccgccagcctgcgcgccaccgatgaacgtttattattggcctgcggtgcaaatatggttatcccgtggaatgcgccactctcccgctgtctgacgatgatcgaaagcgtgcaagggcagaagtttagtcgctatgtgccggaagatatcactaccttgctgtcaatgacccagccgctcaaactgcgtggtttccagaagtgggatgtgttctgtaatgccgtcaacaacatgatgaataaccctctattacctgcccacggtaaaggcgttctggttgccctacgtccggtaccgggtatccgcgttgagcaagccctgacgctatgtcgccctaaccgtaccggcgatatcatgaccattggcggtaatcggctggtgctgtttctctcattctgtcggattaacgatctggataccgcgttgaatcatattttcccattgcctactggcgacattttctcaaaccgaatggtctggtttgaagatgatcaaatcagtgccgagctggtgcagatgcgcctgcttgccccagaacaatggggcatgccgctgcctttagcgcaaagttctaaaccggtcatcaatgccgagcacgatggtcgccactggcgacgaataccagaaccaatgcgactgttagatgatgctgtggagcgctcatcatgatgaccatcagcgatatcattgaaattattgtcgtttgcgcactgatatttttcccgctgggctatctggcgcggcactctttgcgacgcattcgcgacaccttacgtttgttctttgctaaacctcgttatgttaaaccggccgggacgttacgccgcacggaaaaagccagggcaaccaaaaaatgactcaatttacgcaaaataccgccatgccttcttccctctggcaatactggcgcggcctttccggctggaacttctattttctggttaagttcggcctgttgtgggcgggatatcttaacttccatccgctcctcaatctggtgtttgccgcgtttctgctgatgcccattccgcgctacagcctgcatcgcttgcgccactggattgccctgccgatcggctttgctttgttctggcatgacacctggttgcctggcccggaaagcataatgagccagggttcgcaggtggcggggttcagtaccgattatttaatcgatcttgtcacacgctttattaactggcagatgattggggccatttttgttttattcgtggcctggttattcctgtcacaatggattcgcattaccgtttttgtggttgccattctgctatggctgaacgtacttaccctggcgggaccaagtttctccttgtggccagccggtcaaccgacgaccactgtaacaacgacgggtggtaacgcagcggcaaccgttgcggcgacgggtggcgcaccggtagtgggtgatatacccgcacaaactgcaccgccaacaacagcaaaccttaacgcctggctgaataatttctataacgcggaggcgaaacgtaaatcgatcttcccgtcttcgctgcccgctgatgctcagccatttgaactactggtgattaatatctgttcgctttcctggtcggatattgaagccgccggattgatgtcgcatccactgtggtcgcatttcgatattgagttcaagaactttaactccgccacctcctacagtggcccggcggcgatccgtttactgcgcgccagctgcgggcagacttcgcacactaatctgtatcaaccggcaaataacgactgctatctgtttgataacctgtcgaaactgggctttacccagcacctgatgatgggacataacggccagttcggcggttttttgaaagaagttcgcgaaaatggcggcatgcagagcgaattgatggatcaaacaaatctgccggttattttgctgggctttgatggttcgccggtttatgacgataccgccgtgcttaaccgttggctggacgttaccgaaaaagataaaaacagccgtagtgccacgttctacaacacgcttccactgcatgacggcaaccattatccgggcgtcagcaaaacagcggattacaaagcgcgggcgcaaaaattctttgatgaactggacgccttctttactgaactggagaaatcgggtcgtaaagtgatggtggtcgtggtgccggaacacggcggcgcgctgaagggcgacagaatgcaggtatctggtctacgtgatatccctagcccgtctatcacagacgtccccgttggggtgaaattcttcggcatgaaggcaccacatcagggggcaccgattgtcatcgaccaaccgagcagcttcctggctatctccgatctggtggttcgcgttcttgatggcaagattttctccgaagacaatgttgactggaaaaaactcaccagtgggttgccacaaacagcaccggtctccgagaactcaaatgcagtagttattcaataccaggataaaccgtacgttcgcctgaacggcggcgactgggtgccttacccgcagtaagaacgaaaaaggccgcagagtttccccctgcggcctgatccgggcgcaaattgccattacggcagcctgacgcccgcatgacacgttacttccgcttattcagccagttcacgatcatactggcaagaatgccagcaatgaccggagccgctaaatcatgccagaaggccatgcccagttctgcgagcgtcatatagccgcctgtgttgtaatgacaacgtttcgcggctattcttgagttgtttgggttcaagattagcccccgtgatgttgtcaggtgcatacctgcaatatgcgggggttttctctctccagcaaccaatgccaccagggattaagcccccgcaacattgcgcctcaccggaacccttccggcttgccgctgattctacgactgtttttctgttccggaatccgtcacgtcttcactctgtgctgcgcattccgcagaatattatccgcttgcaaccgttgcatttttcttacgaaaaaggccgcagagttttatccctgcggcctgatccgggcgcaaattgccattacggcagcctgacgcccgtctggcacgttacttccgcttgttcagccagttcacgatcagactggcaagaatgccagcaatgaccggagccgctaaatcatgccagaaggccatgcccagctctgcgagcgtcatatagccgcctgagttgtaatgacaacgtttcgcggctattcttgagtggtctaggttcaagattagcccccgtgatgttgtcaggtgcatacctgcaacgtgcgggggttttctctctccagcaaccaatgccaccagggataaagcccccgcaacattgcgcctcaccggaacccttccggcttgccgctgattttacgattgttttttgccgtcagcacccggcaatcttcctcattgcgtgatgccttccagcttaatttctttatttgcaatagttgcagctcatatccgggctgactccagactagtagtgaaatgcgcaattttgtagaattgcgcctcctcgcgacctccccagtgaatctgttgcctcattttttacatactgcgtattcgacttctccacctgttgcgcaagagaaactgggtttattcatttttgcgaggccgacttctttctggacaggactttatgcagcacaacacactaccgaaacacgatcagaaattgccgtttacacgctacgacttcggctgggttttattatgcataggcatggcgattggtgccggaaccgtgctgatgccagtacaaattggcttgaagggaatttgggtatttattaccgcagcgatcattgcttatcctgccacctgggtagtacaggacatttatttaaaaaccctttctgaaagcgattcctgtaatgactacaccgatattatcagtcattacctggggaagaactggggaattttcctcggggttatctactttttgatgattatccacgggatttttatctactctctctccgtggttttcgacagcgcctcgtacctgaaaaccttcggtttaaccgatgccgatctttctcaatctctattttataaagtcgccattttcgccgtactggtggcgattgcgtctggtggtgaacgattactgtttaagatttccggaccaatggtggtggtcaaagtggggattattgtcgtgttcggttttgcgatgatcccgcactggaatttcgccaatataaccgccttcccgcaagcctccgactttttccgcgatgtcctgcttactattccattttgcttcttttccgcggtatttattcaggtacttaacccaatgaatattgcctatcgtaaacgggaagcggataaagtactggcaacccggctcgcgctgcgtacccaccggattagctatatcacgctcattgcggtgatcttgttttttgccttttcgtttaccttctcaattagccacgaagaagccgtttctgcctttgaacaaaatatctcggcactggcactggccgcgcaggtgatccctgggcatatcattcatatcacctctacggtactgaatatctttgccgtactgactgcattctttggcatttatctcggtttccacgaggccattaaaggcattattctcaatctgttaagccgaattattgataccaggaaaattaactcactcgtgctgactctggcgatctgcacttttatcgtcattacgttgacgatttgggtttcgtttcgtgtatcggtgctggtgttctttcagttgggaagcccgttatatggcattgtgtcgtgcctcattccgtttttcctgatctataaagtctcacaactggaaaaacttcgcgggtttaaagcctggatgattctgctgtacggcattttgttatgcttgtcgccactgttgaagttgattgagtaaaccggagcgcatggccccggttttgtgagttaacgctgcggattttcatcctgatcaacagcaaaacaggctaccagttgaccgccgtagtcttttagctgcggctgcaactgggtgcaggggccgaagcgccgacgacagcgggcgttgaaggcgcagcctggcggtggattcagcgggcttggcagttcaccggtaagtttgatgcgttcgcgacgatcgtccgggttcaggcgtggtgtcgcggagagcagcgcctgagtgtacgggtggcgcgggttattgaagatttggtccttcgtccccttctccacgcagcggcccaggtacatcaccatcacttcatcagcaatgtgctccaccaccgacagatcgtgggagataaagacataagatagccccagttcctgctgcaaatccatcatcagattcagcacctgcgcacgcactgagacgtccagcgcggaaaccggctcatcggcaatcaccacatccgggtcgagcatcagacctcgggcaatggcgatacgctgacgctgaccgccggagaacatatgcggatagcggtcgtaatgctcggttttcaggccgactttcgccatcatcgacagggctttttcccgacgctgttctttgcttaagctggtgttgatcagcagcggctcttcgagaatctgcccaacttttttacgcggattcagcgaaccgtaagggttctggaagacaatctggattttctgccgacgtagcttctgcgcctgcggatcgtgcttgagcagatcctgcccctggtaatacagttcgccgccggtgggcgtttcaatcatcgtcagcaaccgaccgagggtcgatttaccgcagccagattcacctactactgccagcgttttgccacgttcaaggttaaacgaaacgccatccagcgccttcaccagacgttccggcgcgaacatgcctttcttcaccggataatgttttttcaggtcgatagcctgcaacagcggttgttgcgaggtggcctcatgcgtactcatagtgtcggcctcccggcatcatcaagtgggtaatggcatttggactgacgcccgtcagcgagcatattcagcgccggttcttcagcacggcatttgtcagtggcgtaggggcagcgcgggttaagcaggcagccgttcgggcggtcgtacttgccgggaacgacacctggcaacgacgccagacgttctttgtcctgagcaaattccggcagcgcacgcagcaatgcctgagtatacgggtgacgcggcgcatggaagatagcgtgcgcatcgcccgtttctactacctggcctgcatacatcacgataattttatgtgccgcttccgccaccagcgccaggtcatgggtaattaacaccagcgccatgttctctttctgctgtagctccagcagcagttcgataatttgcgcctgaatggtcacgtccagcgcagtggtcggttcatcggcaatcagcagttttggtcgacaggcaatcgccatggcgatcatcacgcgctggctcatgccgccggaaagctgatgcgggtaaacatccagacgcgatgccggatcgggaataccgaccagattcagcaggtcaatcgctcgctgacggcgggtacttttgttgccgccttgatgcaccttaatcgcttccataatctggaaacccacggtgtagcacgggttaaggctggtcatcgggtcctggaagatcattgccacttcggcacccaccaggttgcggcgctctttttctgagatacgctgcaaatcctgaccgttaaactccagcttttccgccattacgcggcccggataatcaatcagccccataattgccagcgaactgaccgatttaccagagccggactcacccacaatcccgaccacttcaccctgttttacgctgtagctgatgcggtctacggcgcggaacggtgcgctttcgtcgccgaaatgcaccgataatttatctacatttaataacgccatctcgaacctcttactgcttcagtttgggatcgagcgcgtcacgcagaccgtcacccatcaggttaaatgccagcaccgtcagcaggatcgccagacccgggaaggtcacgacccaccaggcgctttgcgcgaactgcaacacatcagagagcatggtgccccactccggcgttggcggctgcgcgcccatgccgaggaaaccaagagcagccatatcgagaatggcgttagagaaaccgagcgacgcctgaacaatcagcggcgcaaggcagttcgggaagatgttaataaacatctggcgcattgccccggcacccgccacgcgagacgcggtgacgtaatcgcggttaacttccaccagcacggcggcgcgggttaagcgcacataatgcggcagcgcaacgaaggttagcgccagcgcggcgttaccaatcgacgggccgaaaatcgccaccagcaccagtgccagcagtagacttggcagcgccagcatgatatcgaccacacgcatgatgatgttatcgaccagaccgccaaagtaaccagcgatcaggccgagaataacgcccataatcagcgataacaccactaccagacagccaaccagcagcgacaagcgcgcgccgtacatcagccgcgacagcacatcacgccccacgtcatcagtgcccagcaagtgcgccatgctgccgccttcctgccaggctggcggggcgagcagtgcatcgcggaactgttccgctgggttatagggtgcaatccagttggcaaagatcgcgataaacagcacgatgacgacgtaaaccagcccgacaaccgcgcctttgttgcgtttaaaatagtgccagaactcctgtaacggggtcatcggcaccggtgcgctaatcactttattttcagtaacctgtgacatgatgtccccttacttcttatgacgaatacgcgggttcaccacgccgtacagcagatcgaccagcaggttgacgaggataatcatcgtcgccaccagcaatacgccgccctgcactaccggataatcgcggcgttgcagtgcgtcaatcaaccagcgccccagaccgggccacgagaagatggtttcagtcagaatcgcccccgccagcaatgttcccacctgcaggccgataacggtcaccaccggcagcatcgcgttacgcagcgcatggacgataatcacccgcatccgggtaagacctttggcacgcgcggtgcggatataatcttcgcccagcacttccagcatcgaggagcgcgtcatacgcacaatgaccgccagcgggatggtacccagcacaatggcgggcaggatcatatgggcgacggcatcgataaagttaccgtcttcaccccagatggcggtgtcgatcagcataaaaccggttaacggattggaatcatcgaggaacaccatgtcgctcacacgaccggagacaggcgtcaggttccagtgcaccgaaaccagcatgatcagcatcatgccccaccagaaaattggcatcgagtagccggtcagcgccaggccaaccgctgtgtgatcgaaaatggaaccacgtttaaccgcagccagcacaccaaccggaatcccgactgcggtcgcaaaaatcatcgcgcagacgccaagttccagcgtggcctgaaagcgcggcacgaactcttcccataccggaattcggcttttcatcgaaatgcctaaatcaccgtgcattacgccccaaatgtaatggagatactgctgccacatcggtttatctaagccgagttcagccagcaattgcgcgtgacgctctggggagatcccacgttcgcccgccatgatcatcaccggatcgcccgggatcatgtggacaaaggcaaatgtgagaagggtaataccgataaacgtggggatgacgagtcccaaacgtcggagaataaactgcaacataacccggattctctataatgacccgcagcctggaactgcgtgtctgtattgctcacaaatcaattcccgcccttgtgggacagggaatgaagtattgctgccggatggcgctgcacgcagaggcacagcgccaccgggtatgcagattgttgacaaagagcgctttgtttatgccggatgcggcgcaaacgccttatccgacctacaaaatcgtgcaaactcaatacattgcagagttttcgtaggcctgataagcggagcgcatcaggcagttttgcctttgccatcagtcttgtatggctttaattattcgatagagacattttcgaagtgatgtttgcctaatggatcaaccacatagcctttaacttctttgcgtaccggttcaaacacggtggagtgagcgatgatcagtgccggagcctgatcgtgcatcacgacctgtgcttgtttgtacagttcaacacgtttattgtggtcgtcggtagcacgcgccggttgaatcagatcttcaaacggtttgtagcaccattttgagtagttggagccttgttcagaggcggcgcagctgaacagggtggcgaagaagttatccggatccccgttatcgccagtccagcccatcattaccgtctgatgctcgccatctttcgcacgcttgaggtactcaccccattcgtaggtgacgattttggcctgcacgcccactttcgcccagtctgcctgaatcatctccgccatgcggcgagcattcgggttatacggacgttgtaccggcattgcccacaggtcgatggagaaacctttttccagacccgcttctttcagcaaggctttcgctttttcaggatcgtaagtgtagtcctgaacgtcgtcgttatagccccacatggttggcgggatcaggtttttcgctgatacgcccgcgccctgataaaccgctttgatgatagcgtctttgttcaccgcgtaggtcagagcctggcgaactttcacgtcatccagtggttttttctgcacgttatacgagagataaccgacgttcagccccggcatttccatcaggttgatggatttatcctgcttcatgcgggcgatatctgccgggttcgggtacggcatcacctggcattcgttcttctgcaatttcgcgtaacgcacggaagcgtcaggagtaatagagaagaccagcgtatcgatcttcggtttggtgccccagtagccatcaaacgctttatagcgaatacgggaatctttctggtactgctgtaactggaacgggccggtaccgattgggttgaggtccagtttttccggtgtaccggctttcatcatcgcgtcagcatattcttttgacagaatagaggcgaagtccattgccaggtcagcgaggaacggcgcttccgggcgagtcagcacaaactgaacggtgttatcgtccacctttttcacttcgctgattagctctggcaagcccatgccttcgaagtattcgtagctgccgccagagactttatggtacgggttttgcgcgtttttctgacgatcgaacgagaacactacgtcatcggcattcagttcgcgcgtcggtttgaattctttattgtcgtgccacttcacacctttacgcagatggaaggtataggttttaccgtcttcgctgacttcccacttttcagcgaggcccgggatcacttcagtggtgccgattttaaattcaaccagacggttataaagcggtacggaagaggcgtcataggtggtgccggaggtaaacagctgcgggttaaacccttccggagatccttctgagcaataaaccagagttttagcctgaacacttgctgcgacggtcatagccaccaggctgagaccaagcttcagcatccctgactttttcaaggaaatacgcattattctgctccaattgtgatgtttgttgttttaaccctttgcagtgggttgtcgctgcctgaccttttttgttttttgcccggtcgggtcaacgttatgaggtggggatgccgtactaattaacatcagtgtaacagtgcggatcctccataaaatgcccctcgtgacctacaatctgtcaacagaatgtgaaaacgtcaatacagccaaccgggatttacaccaacggtgagaatccacaaacaaagattaaaaaaacttcaaacagctatttgcagcagagaaatttgtgctactccaacatgaccagaacaatcagcttaatatttagcaacaattggtgattaagttttatgcattttgtgaaaaaaatctgaggaaaaggtggatatctgagcgattaataccatgaacgctaaaacgcacagcggaaaatgccagcgccagccataagtaacgcaaaaaaagatttaagcaaatataaaaaaagacaatggtttctgtcacaaatccgttaatggatagtgagatatggggcgcaaatttgacagggaaatgtgtggtgtgtagatcggataaggcggtcgcgccgcatccgacaatgggccggtacatttgcctgatgcgacgctggcgcgtcttatcaggcctacgtcgagtcgaacctccccgcccccgggggttctcttcctcatgagctacagatgcaaaaaagcctgctcgttgagcaggcttttcgaatttggtcggtgatagaggattcgaacctccgaccccttcgtcccgaacgaagtgcgctaccaggctgcgccaatcaccgaatgcggggcgcatcttactgcgcagatatgccctcgtcaatcccttaatagcaaaatgccttttgatcggcgagaaagtcagcaggcctcttagttagccgccgcctctcttgcctgcgggatgtggcaccagttgttgttttcgttaattccaccatccggtgaagtatagccaagacaacccatgatggtgtcgtacagctctacatgacggcgtggcactttcatgtcggcttcttttttcagctgcgcaaatgcctgcgcattgaccggattttccagatatttatccgacatccagaccatcatcggcacacggaactgttccggcggtgccagttcacgcggcgtgccgtgcaggtgctcgcgttcattaattgactcaccgtggtcagctgcatagaacacaatcgctttcttatcgcgaacctgatcaatcacgctggaaataaagtgatccacataggtcaccgagttgtcgtatgagttgatcatctgcgctttggtacagccgctatcaacaccaatacattccggcttccactgcgcaaagctgcgcgggtaacgctgggtgtagttaaagtgtgagcctttggtatgcagaatgatcagatgcttaccatccgggttgcgccccagcgattgctgcatttcgtctaccagcaacatatcatctaccggcttgccacggttacgtggctccgcaccaatctgctcacgataagcaatgttgtccgccatcgtattgctgtagaaccacatttcgctttgcatagcgtagagatcagaactgaatcctaactgcttcaataccgcgaaaatgttctgttcttttaatgtgcgctgcggattatcttctgctccaccctgacgtacaaacatgcaacgcagtgagagtttggttgcagtatcacaggagtaaccacggaacgccgccagatttttctcctgagccagcttcggtgtggtattgcgttcatagccgaaaatgcccatatgatcccagcgcgtggtttcaccaataatgaaaacgacatatgtatcatcaacgttttgtggagcctggtacgtaaacttcttcgcaggattaaggagagaattgttatcggaagattcatcgacccgcgcccaggcataaagacctaatgccgaaagccagtttgatggcagataagagttcgcgacgacgccgccataactcggcaaatcaacacctgtcgccctctccactttcttctgctggatatccagcaaacgaatcggtgcccaaaccataatacctgccagtacgacgaccgccaggctgcgaatacgttgccctggggttcgcagttgtcggagcaaggtgtaacgacagcggttattccagataaggataagaggcaacgcgcttacggcgattaaccagagaataaagttcagaccaacaacttcttttgacaggtcgatatcggtggtcatgacggatgcgatgatgccataaccaatgactacattaaggaaggtcatgtaatagctggcacctgcggaaaagagcaccaccagcgatgccagaatacgccagctgcggcggccaaacagcgaaagaagacgcagtaaaaagaaggtcaccagtacggtggcggccagttcaacaacagcagaaatacctttccagacggtaaaatcgtgcgcatagctgccgaagcggcggtaaaaaaccgcgccattcataaaaaggccaatatagattgcaagcaagaagctcagcttctgctgtgtaatcgatttgatgtatctcatgcaaacaaaccctggacaaacaggtgataacaccctgcttagtggcttttcaggccaggcaggggaaaagtgcggaggtagtcagataagtaaaatctacacgcgcgaataagtagaccacagcaaagggaaaaagtgtggggaaagagtgtgcacgaagcacaaatttacaaaaatgcaagtttgaaaagagactttagcgttacaaaaagcagtaaaaagggccagctaactggcccaaattttacgcgttattgtttatacatttcgttgatgcgtttgatgcacactgaagctgaagcccagtagctcgcggcagatgattaaagggagccatgcgcctcacgcaacattttctgctctggctggcgaatggtcgtagaaagcgccagtgacagaatcagcagggcgaaaatcacgtagaaagtcacatagaatccgccaaacagtgaagcgataatcgaaccacaaatgctgccgataccgaaaccgaggtaaatgacgccgtagtttttcgccaggttattgaggccgaagaactcactgaccagtgacgggaacaccgtaatcgtgccaccaaagttaaatgccacacaggcaatcgctgcaaagaacgtcactgcattcaatggtgcaaacagcagggcagccatacccaccagcgcaatcacctgaccaatggtgataacacggatacgggcgattttgtcagacagaatgcccagcaccagacgaccagaaaggttggcgatggaaataaccgtcacagcattggctgcggaaattgcatcaagatgcgccaggctttgagcgatatctttcgctacaccaatcacatacagaccactcatgcacgcagtcaggaacataaccgctaacatccagtactgcggtttacgcatcgactctgccagggtgtagtccttctccaccacaccattgctggttttcacttcctgcttcggcgcatctttcattaacgttgcgccaaagacaatcatcaccagtacaatcgcgccccaaataacaaaggttttttccagacccaccgtttcgagcaggtgcgtgtcgataaatttaaaacccaggctgcccagaccataagaaccgatagcaaaagcagagataagtcccttacgctccggaaaccacttcacgcagttagagagcgtcaacaggtaacccgcaccatccgccagaccaaccaacacaccggcgcttaaccacagcatcatcaggttgttggaatgtgctgtcaggaagaaacctaatcccagcaaaatgccggaagccatagtgacgcgtttaacaccaaaacgttcctgcaatttgcccgcaacagaagacgaaattgccagccccagacttaacaagccgaaagagaaagcaacctggcttacaggagcccccagcttggcagaaagcgcaccgttaaacagactccaggtataaaccgaccccagagcaaactgggtaatgatagtaccgatgagtgtcagccagcgagtacgctgataatttgaaggtgtcatggcagtattcctgcagtaataaaaaggaaaaatctctgctgacaaccataacgaagtgcgctttatgcctggggaaaaacggcatgaaatgccatcagaacggaatgaaatgcattagttcaggaatgaatgactcgacaattattcgccaaatttattatttagtaagttagtccccactatcgccacattagttgttatttatgggtttcaattgtatctataacgttaaaatctggcactaacccccatcgtatacagatagtcgctattgttagtggtattttctgcctgagatagcgcagcataggcagcaatattttgattgagcaacatatcagcgcctacggtgacatccagccagttgccgttctggtttgtcgccgtcatccggctcaggcctgattgcgccttccagatattctcgccaaattgctggttatagctgatttgcgcccagggtcgaagatcgccaagccgggagtcaacacgccagcctaaggtactcacgctggcatgccataacggatcggccagcgtggtagtactgtcgccaaactcgttatacatcgaggtagttgtgccatcgtaatgtaatgccgcgaccgggccggttgtaacctgctcatataaaggaaaattccagcccatactcatactgctggtcacatccacaggggtttcttccgccagattgacttccagtcccagcgccctttggctactttgaatacgttgcgacaaaatatcgttgtaatcaggttgatgatcgctatcccaggtgtaacgctctgtggaatgtccgggttgcgtatcaacgatatattcttgttgccaggcgtaagctgtgttgagaaaaaaggcactgattaccacgctcgcaagcaggcttagctgccagcgaccaccgcttttttttatgatcattaacacgactccagggaagagccgaattcggcaatattattgtcattgtatgaaggatatcgggcatagtagccctgtattaaatattgactttttcaccgatgcgtcaagaaaagcggctgaaatttttacgatcgggtacatagcgagggaaagtatggaacgttgcggctgggtgagtcaggacccgctttatattgcctaccatgataatgaatggggcgtgcctgaaactgacagtaaaaaactgttcgaaatgatctgcctggaagggcagcaggctgggttatcgtggatcaccgtcctcaaaaaacgcgaaaactatcgcgcatgctttcatcagttcgatccggtgaaagttgccgcaatgcaggaagaggatgtcgaaagactggtacaggacgccgggattatccgccatcgtgggaaaattcaggcaattattggtaatgcgcgggcgtacctgcaaatggaacagaacggcgaaccgtttgccgactttgtctggtcgtttgtcaatcatcaaccacaggtgacacaagccacaacgttgagcgaaatccccacatctacacccgcctccgacgccctatctaaagcactaaaaaaacgtggttttaagtttgtcggtaccacaatctgttactcctttatgcaggcatgtgggctggtgaatgatcatgtggttggctgctgttgccatccgggaaataaaccatgattcgggaagcgcaacgttcagaactccccgcgctcctcgaactgtggctggaaagtacaatctgggggcatccctttataaaatcgagttactggcgtgactgcattccgctggtgcgcgatgcgtatcttgccaacgcgcaaaactgggtctgggaagaagacggcaagcttctcggttttgtcagtattatggaaggccgatttctggcagcaatgtttgtcgcaccgaaggccgtcagacgcggtattggtaaggcgctgatgcagtatgtgcagcagcgccatccccatctgatgctggaggtttatcaaaaaaatcaaccggcgatagatttctaccatgcgcagggttttcacattgtcgattgcgcatggcaggatgaaacccaactacccacctggattatgagctggccggtggttcaaacgctgtaagtgtcagttccggaccgttgtatttttccagccatgccagcgccgtattacccgcacagccattccccagccgcgagctggggagatctttggtcagcacgttcactgcgccgtttttacaaatgccgtcagcggttaaatccagatctggccatgcgccttcgtgaatacaaatcacgccaggtttaattccctcgctaatgaccgctccggcaagaatttgcccgcgtgagttccacagccgaacagtatcgccatcttgtatgccgcgcgtctgggcatcgtcaggatgaatggtgacaggctcacgatttgccaccgcgtacaattcgcgcagagaactgtaattcagctggctgtgcagacgatgcgccggatgagcagaaagtacctgcaactgttccggttcggcattgccctgccattcgtccggcgccagccacattggatgccccgggcaatccggataagcgtaatcggcaatacgctgcgagaagatttcaatcttaccgctggcggtttttaatggatgcgcctgcggatcgcggcgaaaatcggcgaagcgaataaaccgctcactgtccgggttttccggcatctcaattaactggttggcttgccagaactcagcaaatggcggcaattcaacctgctggcttgccccgcgctgccgggcaacgttataaaacgtttccagccattgcagctcactttttccttccgtaaaacgtgcataaccgcccttctgccaacgttcactcaagtcggcaaaaacatcaaaatcattacgcgcttcatcgcgtggcggcaccacttgcttcatcggcaccagatgctgattactgtaatcaccggtcatggtgagatcattacgctcaaaagaggtggtcgcaggcagaacgatatccgcgtgtttcgccgcagccgtccagaagcattcagagatcaccaccagctccggtttttgccaggcacggatcaggcgattggtatcctgatgatgagtaaagttggcaccgcccgcccaccagataaaacgaatatccgggaaatgtcggtccataccgttatgttgatatgcgccaccagggttttccagtgcttcaacaatgcgggcgacagggattttatctaccgcatcgcagccacccggcaagctgccctgcatggaagagagtaccgcagcgcgccgcgtggggttaccaccattggcaaaatggtaagaaagaccaaaaccgccgccgggtgtgccgatttgccccaacattgctgccagcgtgacgagcatccagtgtttttgctcaccaaactgttggcgctgcattccccagcctgccatcagcatggttgtattttggtggaaaatagccgccagctcgcggattttcgctgcgccaacaccacaaatctctgccgcccattcggcgtttttcgctataccgtcactctcgcccagcaaataagaggcgaagacggcataacctgtggtgcaacgcgccagaaacgcttcgtcgtgccaaccattttccaccagcgtatgggcgatccccagcatcaacgcaacatcggtgcccatgtgtggtgccacccactccattttatcgccaaagaaatcgatggtttccgatcgcattggatcaatgcagatcagctttttcccgctgtcacgcagtgcggaaaagtaagaaagcccctgctcatcggatgcattccacgcaattttcagcgtattgagtgggttagcactccacagcaccacgacatcgctatgttccagcaccagcggccaactggtttgctgttgataaacttcgctgccacccacgacatacggcatgatcgcctgtgccgcgccggtcgaataatcccccagatgcccggtataaccgcctgccagcgccatatagcgttgtaataatgtcgaggccttatgcagcacgccgtttgaacgccagccgtaggaaccagcaaaaatcgatgccggaccataagcctcacgaatgcgtttatgctgatggtgaataagctccagcgcctcatcccaactcacgcgaacaaattcatcctgcccacgaatgccttgcggattttccggtgacgcaagaaagcctttgcgcaccattggaaatcgcacccgcgtattgctgtgaacctggtcgcgaaccgcgctctgcaaggagttttccattcctgtggctaacgcgccacgcgagctaaacacggtttcgccgtcggtttcaaccagcataggcccccagtgggcggcagtcagaacggaatatcgtgaggatgagttggccaaaccgaagactcctgaaaggttagatgtattgagcagttaaatattacttacaaatttccgagtattcccaggaataatcttcatgctcacgcggcataatctcccgccacggaacccgtggcaaagaataaaaaggttattaaggattaacaatgaagaaacgtgtttatcttattgccgccgtagtgagtggcgctctggcggtatctggctgtacaactaacccttacaccggcgaacgcgaagcaggtaaatctgctatcggcgcaggtctgggctctctcgttggcgcgggtattggtgcgctctcttcttcgaagaaagatcgcggtaaaggcgcgctcattggcgcagcagcaggcgcagctctgggcggcggcgttggttattacatggatgtgcaggaagcgaagctgcgtgacaaaatgcgcggcactggtgttagcgtaacccgcagcggggataacattatcctcaatatgccgaacaatgtgaccttcgacagcagcagcgcaaccctgaaaccggcgggcgctaacaccctgaccggcgtggcaatggtactgaaagagtatccgaaaacggcggttaacgtgattggttataccgacagcacggggggtcacgacctgaacatgcgtctctcccagcagcgtgcggattccgttgccagcgcgttgatcacccagggcgtggacgccagccgcatccgtactcaaggccttggcccggctaacccaatcgccagcaacagcaccgcagaaggtaaagcgcaaaaccgccgtgtagaaattaccttaagcccactgtaatccctttcatgtcaggtgatgcagaaatcacctggcattcttcagttttccttcatcatatttcaggctaaggtgatcgccttatcagtgaatggagagaagcatgaagccgtccgttatcctctacaaagccttacctgatgatttactgcaacgcctgcaagaacatttcaccgttcaccaggtggcaaacctcagcccacaaaccgtcgaacaaaatgcagcaatttttgccgaagctgaaggcttgctgggttcaaacgagaatgttgatgccgcattgctggaaaaaatgccgaaactgcgtgccacatcaacgatctccgtcggctatgacaattttgatgtcgatgcgcttaccgcccgaaaaattctgctgatgcacacaccaaccgtattaacagaaaccgtcgccgatacgctgatggcgctggtgttgtctaccgctcgtcgggttgtggaggtagcagaacgggtaaaagcaggcgaatggaccgcgagcataggcccggactggtacggcactgacgttcaccataaaacactgggcattgtcgggatgggacggatcggcatggcgctggcacaacgtgcgcactttggcttcaacatgcccatcctctataacgcgcgtcgccaccataaagaagcagaagaacgcttcaacgcccgctactgcaatttggatactctgttacaagagtcagatttcgtttgcctgatcctgccgttaacggatgagacgcatcatctgtttggcgcagaacaattcgccaaaatgaaatcctccgccattttcattaatgccggacgtggcccggtggttgatgaaaatgcactgattgctgcattgcagaaaggggaaattcacgccgccgggctggatgtcttcgaacaagagccactgtccgtagattcgccgttgctctcaatggccaacgtcgtcgcagtaccgcatattggatctgccactcatgagacgcgttatggcatggccgcctgtgccgtggataatttgattgatgcgttacaaggaaaggttgagaagaactgtgtgaatccgcacgtcgcggactaagccgcgactgcgtggagtaaagcccgataatcgctcgggcttttactctttattgggttgcagtaactgctgtagtccaggcctgattaaacgcctgatgttgtgccggtaatggcgcaatcagtttgttatattcacttgcctgctgtgaagtcgggaactggatgccatttgcgacaaagctcacctgagtaccttgctgagcaatgtagtctccaaccatcaccagttgttgcgtgaaagtttgtgccgccggaatcaacggttgcaatgcatcagctggcgtcgttaccactttggtgaatgcctgatcaaagaccggtttcaggtcatcactctgttttaacgcagagtgcgcagcatcggcctgcaacttcgcattttgcagctgttgcgccagcacacccagcgaaccgttcatttcacgcagcggaccgctttgcgtaacgtaatcctgcggtacgcgaattgcgttaacgctgtctacaaccgggcgcagaccggaatccatcgcctgattcacctgctgagaataaccatacagaatcgcgtaatcagagacaaaaggaccaaactgttttttctgatcggcagtcagggttggtagacgttcaccgctacgcatcactgtattctgcaggaagtcgataaacgctttacgctgatcgccttctttatcaaaacacccactcaggctaactaccattaataacgccgcaagaggcgcaaaccagcgagagcaggactttcctgtcgccattttcttactcctttcacccaaaaaaagcgcacaacgacacacgcgtgtctgacgtgacaaggatagtccaggacaggcttgcaggataccctttctacgtaatcttcctggtaaaatcatggagaaaatgaaacaaggttaatttgttgtttcattgttaaaaaatgatattgccgttgccttttttgtagccagagatttacgccttcgcagaacgttagattttcgaaatctttacaaaccgggagtggtaagagatatatcggcatttatcagatcgttaggtggctataagtcacgctaaatgactggctgaatcgaatcatagtcagagtatgccctgactacaccccgctgtgtctgtttttcccgactattcttaatgagcttcgatgcaattcacgatcccgcagtgtgatttgaggagttttcaatggaatataaagatccaatgcatgagctgttgagcagcctggaacagattgtttttaaagatgaaacgcagaaaattaccctgacgcacagaacaacgtcctgtaccgaaattgagcagttacgaaaagggacaggattaaaaatcgatgatttcgcccgggttttgggcgtatcagtcgccatggtaaaggaatgggaatccagacgcgtgaagccttcaagtgccgaactaaaactgatgcgtttgattcaagccaacccggcattaagtaagcagttgatggaatagacttttatccactttatttctgtttacggtcctgataacaggaccgttttccaaccgattaatcataaatatgaaaaataattgttgcatcacccaccaatgcgtggcttaatgcacatcaacggtttgacgtacagaccattaaagcagtgtagtaaggcaagtcccttcaagagttatcgttgatacccctcgtagtgcacattcctttaacgcttcaaaatctgtaaagcacgccatatcgccgaaaggcacacttaattattaaaggtaatacactatgtccggtaaaatgactggtatcgtaaaatggttcaacgctgacaaaggcttcggcttcatcactcctgacgatggctctaaagacgtgttcgtacacttctctgctatccagaacgatggttacaaatctctggacgaaggtcagaaagtgtccttcaccatcgaaagcggcgctaaaggcccggcagctggtaacgtaaccagcctgtaatctctgcttaaaagcacagaatctaagatccctgccatttggcggggatttttttatttgtttttcaggaaataaataatcgatcacgtaataaaatctattattatttttgtgaagaataaatttgggtgcaatgagaatgcgcaacaccgtaagaaaggcgggaataatttcccgccgaagacgcttactctttcaatttgcaggctaaaaacgccgccagctcataactctcctgtttaatatgcaattcacacagtgaatctcttatcatccaggtgaaaaataaaagcgtgaaacaaatcactattaaagaaagtaatctatatttctgcggcattcccagccccctgtgttgatttccaacgagtaagaggctaaccttatggtgtctatgcatagaggggcctcactttgatttatagtcaggtggggcttttctctgtctgcctttcggtgaatacctgagacaaacagtctcaagcacccgtggctattccagcttaataagttcgtttcttctccttgatataatcctaaaaaaatctcataaaattaatatatgagataatctttattcagcagaagattattaaaggttgctgtattatttagcgataaaaaaagcctgccagatggcaggctttttaataacggcgttattactgcaacagcgaaatatccgcaacgcgcaggaacagttcgcgcagtttttccagcatggtcagacggttgatacgcaattctttatcatcaaccatgaccatcactttatcgaagaaagcatcgaccggttcacgcagctcagccagttcgaccagcgcatcctggtaacgaccttccgcaaagtacggctccagcttgtcacgtagcaccacaacctgcatagccagcttaatttcttccggctctttcagagtagaggcattcacgcgatcgctcagcacttcgtcagatttcgccagaatgttagatacacgtttgttcgccgccgccagtgctgcagctgcttccagggtacggaagtgcgataccgctttcatacgggcatcgaaatcagccggacgagtcggacgacgcgccagtaccgcctggatggtgtcaacggtgtaaccttcgtcctgataccaggcgcggaagcgaccgagcataaagtcgataacatcatcaaccacgttggcgttagtcagcttatcgccatacagacgcactgcttcttcggtcagcgtttgcagatcaaggttgaggttcttctcaacgataatacgcagcacgccaagtgcggcacgacgcagcgcaaacgggtctttgtcgcctttcggatgctggccgataccgaagatacccgccagggtatccatcttgtcagcaatcgccagcgcacaggctaccgggttagacggcaggtcatcaccggcaaagcgcggctgatactgctcattcagcgcgacagctacgtcttccgcttcgccatcgtgacgcgcgtagtgcatccccataacgccctgggtgtcggtgaactcgaagaccatgttggtcatcaggtcacacttagacagcaggcccgcacgggtagcgtggttaacgtcagcgccaatctgctcagcaatccagccagccagcgcctgaatgcggtcagttttgtcgcgcagcgtccccaactgttgctggaacaacacggtttgcaggcgcggcaggttatcttcaagacgttttttacggtcggtattgaagaagaactcggcatccgccagacgtggacgaacgactttctcgttaccggagataatctgctgcggatctttcgattcgatgttggcaacgaagataaagttcggcagcagtttgccgtcgttcgcatacaccgggaagtacttctggtcacctttcatggtgtaaaccagcgcttcagacggcaccgcgaggaatttctcttcgaattttgcggtcagcacaaccggccattccaccagcgaagccacttcttccagcagactttcgcttaagtcagcgttaccgccaatcttacgtgctgcttcttcagcatcggctttaatcttcgccttacgttcttcgtaatcggcgatgactttcccgcgctcacgcagaatttccggatactgatcggcattgtcgatagtgaattccggctcgcccataaagcggtggccgcgaatcacgcgatcggactgaatacccagaatggtagccggaataactttgtcgcccagcagcagggtcacggtgtgaaccggacgcacgaagtgcacgtcgcttgcgccccaacgcatcagtttcgggatcggcagtttcgccagcgaagtcgcaaccatattcggcagcagtgcttcggtgctttcacccttcacatgggcgcgatacagcagccattcgcctttatcggtagtcagacgctcagcctggtcaacggtaataccgcaaccacgcgcccaaccttctgccgctttgctcggtttgccttcagcgtcgaacgcctgggcaattgccgggccgcgtttttctatttcgcgatccggttgcgcctccgccaggttagcgactttcagcgccagacgacgcggagcagcaaaccattgaacggtgccgtgtgcgaggccagcgttatccagctccgcagtaaagttcgcagcaaaggactcagccaggctgcgcagtgcttttggtggcagctcttcagtgccgatttccaccagaaaagttttctcagacatagccgcctcttacttatctttgttgcacatcgggaagccgagggcttcacgggaagcgtagtatgcttctgccactgctttggtcagggtgcgaatgcgcagaatatagcgctgacgctcggtgacggagatggctttacgcgcatccagcaggttgaagctgtgggcggctttcagaatacgctcgtaggctggcagcggcagcggattttccagcgccagcagttgctgcgcttctttctcgtactgctcgaagcaggtgaacaggaagtccacatccgcgtattcgaagttgtaagtggactgctccacttcgttctgatggaacacgtcgccgtaggtggttttacccagcgggccgtcgctccagaccaggtcgtaaacgctgtctacgccctgaatgtacatggccagacgttccagaccgtaggtgatctcaccggtaaccggtttacattccagaccaccaacctgctggaagtaagtgaactgcgtcacttccatgccgtttagccacacttcccagcccagcccccaggcacccagcgtcgggttttcccagttatcttccacgaaacggatgtcgtggatggtcgggtccatgcccagctctttcagagaaccgaggtacagctcctgaatattgtccggcgatggcttaatgaccacctggaactgatagtagtgctgtaaacggttggggttttcgccgtagcgaccatcggtcgggcgacgagaaggctgaacataagcagccgccatcggttctggccccagcgcgcgcagacaggtcattgggtgagaggttcccgcgccgacttccatgtccaatggttgaacaatggtgcagccctggcgagcccagtaatcctgtaaggtcaggatcaagccctggaaggtcctggtatcaaacttttgcatattatttcgtgctggatacgtgtggatttaaaggaagggatcagtatacccgctggatggaagatatacagtacgaaacgggaaaaagcagggcttaacgcatggaaagatgcaaaaaatggccatccgcgtcaaaagaacagacaaactgctctttccggaaggtataaccgcgcatttcatagcttccctggaactgttcgaaggcggtgacgtcgattttttgctcgccggtgttataacgttttgccgcctgatccttgcataacgcttccatattcaacgaacgcagaggatcaacctttacccgttgtgctttctgcacgggtggcggtgtagaacaacccactagcacaataagcgccattgctggaaagaaagcgttcatcatcattaaattaccgtctggtttgcaggtgagtcttattatttatatcggtatagtggctgatatcttacgaatttccttaagcctctataagctgtagtgataaaactcagattattccagtgcgccaactgaatgatttatcggtcagactttttttaaccagatacagagacacagatgcagcccaaaatttactggattgataacctgcgagggatagcgtgtttaatggtggtgatgattcacaccactacctggtatgtgaccaatgctcatagtgttagccccatcacctgggatatcgccaatgttctgaattctgcctctcgtgtcagcgtgccgctatttttcatgatttccggctatctcttttttggcgaacgcagcgcccagtcgcgccatttcttgcgtatcggcttatgcctgtttttttatagcgcaatcgcgctgctctacattgcgctgtttacctccatcaatgtggagttagcgctgaaaaacctgctgcaaaagccagtgttttaccatttatggtttttcttcgcgattgcagtgatttatctggtttcaccgctgattcaggtgaagaacgtcggcggaaaaatgttgctggtgctaatggtggtgattggtgtcatcgctaacccaaacaccgtgccgcagaaaatcgacggttttgaatggctgccaattaacttatatatcaatggcgatactttttactacatcctttatggcatgttgggccgcgctatagggatgatggacacacagcataaagcactgtcgtgggtgagcgccgcactgtttgcgacgggggtttttattatctctcgcgggacattatatgaattacagtggcgcggaaattttgccgatacctggtatctttactgtgggccgatggtttttatctgcgcaatcgcgttattgactctggttaaaaacacgctgtatacgcgtactatttgcggacttggcttaatctcccgccattcgttaggtatatacgggttccatgcattgattatccatgcactgcgcacccgggggattgagcttaaaaactggccaatactcgatattatttggatcttttgcgcgaccctggcagtgagtttattactttctatgctggtacaacgaatcgacagaaacagattagtgagttaagtagaagcccggtcacattggactgaccgggcttatgtgaattattcgctgtattcttcctgggtaacctgtgtttcttttggtgggtttattccggcatcacgaatattcttctgcaccgctactgcaccaaacaagcttaagaagaaagccagcccataaaagcctttttcgctgagtaataacgttgcattccatagacctaccagcaacaacgcaacagagataataaagaccgtcaggcaagtcatataataaatgggggtggtaggtatgccttcatacttgtcccgaacggtcttttgataagacgccgcggaaaacaaacctaataccagtacggcaaaataataccctttttcatttaactgcatctctgcattccatagtcctaacagataggtaacaataccgccaataagggctacccatgaaacaatactaaatgccggagaataggttgatattttgttgtccatcacagtattcctttcattcctgaatgtgtaagaactttatgttgctcatgccgagcgaaacaaacgcatttgaccaaacaagcagacaaaaaaggcgatggggtagatcaccatttcataagcattgataggtgcgtttaaaacaccgataaacaagagaccgatagtgattaacgctaccaactgacagacgtggataaaaaaatcatccagttgcccaagtttttctgcgcgaagatatgcatagttgccaaaagttgccgtcattaacacgccaagaaaataaccttttccacttaacaatgggcatgagatccatagcccaaccagataaaccagcgccccgacaacaaataatagttttgccacagtctttgaggttttcataacgatctccatatctaccagcgatacattacgagtaaccaacgaaagacaaaactgaaaaatgccattaacaaatgattttcagaataaattcatactaaatattaattaattatttatatatatagatgtgaattatcccccacccggtcaggcaggggataacgtttacgccattaatggcagaagttgctgatagaggcgacggaacgtttctcgtcgtggctgataagcggcataacactgcgcatctggtagatgcgactgttctaacggtagttgcggcaacaactcaatgagcgatttctctggattcgccgcaatctgcgccagccttgctgcgcccagtgctggccccacatcgccacccgtgcggtaatccagttgctgaccgctgatgtccgccagcatttgacgccagtactcactacgcgccccgccaccaatcaacgtaacactttgcggtttaatgccgcaggcatgcacgacatccatgccatctgccagcgcataacccacgccttccagcactgctcgcgccagttcattggggccatgttgatgagtcaaaccaaagaaaacccctttcgcctggggattattgtgtggtgtacgctcgccggaaagataaggcagaaaccaaactggctcggcactttcatcagcctgtcgagctgcagtgattaaagcagggacattgctcaggccggttaatttcgcggcccaatccagacacgaagccgcactcagcattacagacattaaatgccaacgttgcggtaacgcatggcaaaagctatgtacggcgctttctggcttgcttaagaacccttcgctgacagcaaaatagacccccgacgtccccagcgataacattgcctgattagcatcaaccattcccacaccaaccgcaccagctgcattgtcgccaccgcctgcgataactggcaccgccgccataccccacgctttcgcaacttcaggtaacaaagcaccagtaatttcgctgccttcgtataatgcgggcatctggtcacgagataagtggcaagcctgcagcatgagatcgctccagtcacgctttgcgacatccagccacatagtgccagctgcgtcagacatatcgctggcaaactcccccgtcatacgcagacgcaagtaatctttcggtaataatactttatcgatttgacggaatatctccggctcatgccgctgaacccatagcaatttaggcgcagtaaatccgggcatcatcaggttgccggtaatcacccgcgattgcggaactcgcgcttccagcaaagtgcactcttgcgcacagcgcccgtcgttccacaaaatggcagggcgtaacacccgttgctgagcatccagtaaggttgcaccgtgcatctgtccggcaatacctaatgctttaacgtcttgcagagaatgctgaacgcccagagctttcattgcgcgatcagttgcctgccaccactgttccgggtcttgttccgaccagagtggatgcgggcgcgaaacggtcagcttttccgtttgcgcagcaaccacctcaccctgctcgttgagcaaaataacttttacgcccgaggtgccaagatctatcccgatatacatatcgatcgttccttaaaaaaatgcccggtatcgctactgataaccgggccaacggactgcacagttagccgttatttgtcgaacagataatgatttaccagattttccagttgctcctggcgaccactctgatgcaccggagacaaattatgttcctgagcatatttggctaaatctgccagtgacatttggcctttcaggatttgctggcctaattcactattccagccggaataacgctgcgcgatgcgtttatccagctcgccatcttcaatcatgcgcgctgcaattttcagcgccaacgccatcgtatccatcgcgccgatatgaccgtaaaacagatcatatttatcagtactttgacgacgtactttggcatcgaagttcagaccaccggtggtgaaaccgcctgctttgagaatttcatacatcaccagcgcattctcttccacactgttcgggaactggtcggtgtcccagcccagttgcgcatcgccacggttggcgtcgacagaaccgaacaggccaagcgcaatggcggtggctatttcatgatggaaagagtgacctgccagcgtcgcgtggttagcttcaatattcagtttaatctctttttccagaccaaactgtttcaggaagccatagaccgtcgcagcatcgtaatcatattgatgtttggtcggttcttgcggtttcggttcgataagcaacgtgccctggaaaccgattttatgtttatgctcaaccaccatctgcataaagcggcccagctgttcacgctcctggcgcaagtcggtatttaacagcgtttcgtaaccttcacgacccccccacaggacatagttttcaccgcccaatttatgggttgcttccatcgctgtaacaacttgcgttgccgcccaactgaagacttcaggatctgggttcgtcgccgcacccgcgccatagcgagggtttgtaaagcagttagcagttccccacagcagcttcacgccgctctcttcttgcttgcctgccaggacatcaaccatttgcgcaaaattattgatgtactcttttaacgacgcgccctcaggggaaacatccacatcgtggaagcaataaaatggcacatgtaacttgtggaaaaactcaaatgcgacatctgctttacgcttcgccaacgccagtgcctcaccaggctgctgccacggacgattaaacgctcccacaccaaacatatccgccccgttccagcagaaggtgtgccagtagcaggcggcaaaacgcaagtgctcttccatacgcttgcccaacaccagttcgtcgggattgtagtgacggaatgctaacgggtttgaggattttgagccttcataacgaacgcgatcgagctggtcaaaataggcttgcatattgaactccataatcaggtaatgccgcgggtgatggatgatgtcgtaatattgggcactccctttcagttgctcaattatgttatttcacactgctattgagataattcacaagtgtgcgctcgctcgcaaaataaaatgggatgatgaaactgggtaattcctcgaagagaaaaatgcaataagtacaattgcgcaacaaaagtaagatctcggtcataaatcaagaaataaaccaaaaatcgtaatcgaaagataaaaatctgtaattgttttcccctgtttagttgctaaaaattggttacgtttatcgcggtgattgttacttattaaagctgtcctctaactacagaaggccctacaccatgaaaataaagaacattctactcaccctttgcacctcacttctgcttaccaacgttgcggcacacgccaaagaagtcaaaataggtatggcgattgatgatctccgtcttgaacgctggcaaaaagatcgagatatttttgtgaaaaaagcagaatctctcggcgcgaaagtatttgtacagtctgcaaatggcaatgaagaaacacaaatgtcgcagattgaaaacatgattaaccggggtgtcgatgttcttgtcattattccttataacggtcaggtattaagtaacgttgtaaaagaagccaaacaagaaggtattaaagtattagcttacgaccgtatgattaacgatgcggatatcgatttttatatttctttcgataatgaaaaagtcggtgaactgcaggcaaaagccctggtcgatattgttccgcaaggtaattacttcctgatgggcggctcgccggtagataacaacgccaagctgttccgcgccgggcaaatgaaagtattaaaaccttatgttgattccggaaaaattaaagtcgttggtgaccaatgggttgatggctggttaccggaaaacgcattgaaaattatggaaaacgcgctaaccgccaataataacaaaattgatgctgtagttgcctcaaacgatgccaccgcaggaggggcaattcaggcattaagcgcgcaaggtttatcagggaaagtagcaatttccggccaggatgcggatcttgcaggtattaaacgtattgctgccggtacgcaaactatgacggtgtataaacctattacattgttggcaaatactgccgcagaaattgccgttgagttgggcaatggtcaggagccaaaagcggataccacactgaataatggcctgaaagatgttccctcccgcctgctgacaccgatcgatgtgaataaaaacaacatcaaagatacggtagttaaagacggattccacaaagagagcgagctgtaagcgttacgccccggcgcggagcgggggcgtgatttctctccatgccgcgtgaattgattggcttaggtggagtcgttatgccttatctacttgaaatgaagaacattaccaaaaccttcggcagtgtgaaggcgattgataacgtcagcttgcggttgaatgctggcgaaatcgtctcactctgtggggaaaatgggtcaggtaaatcaacgctgatgaaagtgctgtgtggtatttatccccatggttcctacgaaggcgaaattatttttgcgggagaagagattcaggcgagtcacatccgcgataccgaacgcaaaggtatcgccattattcaccaggaattggcgctggtgaaagaactgaccgtgctggaaaatatcttcctgggtaacgaaataacccataatggcattatggattatgacctgatgacgctacgctgtcagaagctgctcgcacaggtcagtttatccatttcacctgatacccgcgttggcgatttaggacttgggcaacaacaactggttgaaattgccaaggcacttaataaacaggtgcgtttgttaattctcgatgagccgacagcctcattaactgagcaggaaacgtcggttttactggatattattcgcgatctacaacagcacggtatcgcctgtatttatatttcgcacaaactcaacgaagtcaaagcgatttccgatacgatttgcgttattcgcgacggtcagcacattggcacgcgtgatgctgctggaatgagtgaagacgatattatcaccatgatggtcgggcgagagttaaccgcgctttaccctaatgaaccacataccaccggagatgaaatattacgtattgaacatctgacggcatggcatccggttaatcgtcatattaaacgagttaatgatgtctcgttttccctgaaacgtggcgaaatactgggtatcgccggactcgttggtgccggacgtaccgagactattcagtgcctgtttggtgtgtggcccggacaatgggaagggaaaatttatattgacggcaaacaggtagatattcgtaactgtcagcaagccatcgcccaggggattgcgatggtacccgaagacagaaagcgcgacggcatcgttccggtaatggcggttggtaaaaatattaccctcgccgcactcaaaaaatttaccggtagtattagccagcttgatgacgcggcagagcaaaaatgtattctggaatcaatccagcaactcaaagttaaaacgtcgtcccccgaccttgctattggacgtttgagcggcggcaatcaacaaaaagcgatcctcgctcgctgtctgttacttaacccgcgcattctcattcttgatgaacccaccaggggtatcgatattggcgcgaaatacgagatctacaaattaattaaccaactcgtccagcagggtattgccgttattgtcatctcttccgaattacctgaagtgctcggccttagcgatcgtgtactggtgatgcatgaagggaaactaaaagccaacctgataaatcataacctgactcaggagcaggtgatggaagccgcattgaggagcgaacatcatgtcgaaaagcaatccgtctgaagtgaaattagccgtaccgacatccggtggcttttccgggctgaaatcactgaatttgcaggtcttcgtgatgattgcagctatcatcgcaatcatgctgttctttacctggaccaccgatggtgcctacttaagcgcccgtaacgtctccaacctgttacgccaaaccgcgattaccggcatcctcgcggtaggaatggtgttcgtcataatttctgctgaaatcgacctttccgtcggctcaatgatggggctgttaggtggcgtcgcggcgatttgtgacgtctggctaggctggcctttgccacttaccatcattgtgacgttggttctgggactgcttctcggagcctggaacggatggtgggtcgcgtaccgcaaagtcccttcatttattgtcaccctcgcgggcatgttggcatttcgtggcatactcattggcatcaccaacggcacgactgtttcccccaccagcgccgcgatgtcacaaattgggcaaagctatctacctgccagcaccggcttcatcattggcgcgcttggcttaatggcttttgttggctggcaatggcgcggaagaatgcgccgtcaggctttgggtttgcagtctccggcctctaccgcagtagtcggtcgccaggctttaaccgctatcatcgtattaggcgcaatctggctgttgaatgattaccgtggtgttcccactcctgttctgctgctgacgttgctgttactcggcggaatgtttatggcaacgcggacggcatttggacgacgcatttatgccatcggcggcaatctggaagcggcacgtctctccgggattaacgttgaacgcaccaaacttgccgtgttcgctattaacggattaatggtagccatcgccggattaatcctcagttctcgactcggcgctggttcaccttctgcgggaaatatcgccgagctggacgcaattgcagcatgtgtgattggcggcaccagtctggcaggcggcgtcgggagcgtggctggagcagtaatgggggcattcatcatggcttcactggataacggcatgagtatgatggatgtaccgaccttctggcagtatatcgttaaaggtgcgattctgttgctggcagtatggatggactccgcaaccaaacgccgttcttgattttgataaaaattttctcaaagccggtaacgtattaccggttttgagtttttgcatgattcagcaggaaaagaaccatgtttactaaacgtcaccgcatcacattactgttcaatgccaataaagcctatgaccggcaggtagtagaaggcgtaggggaatatttacaggcgtcacaatcggaatgggatattttcattgaagaagatttccgcgcccgcattgataaaatcaaggactggttaggagatggcgtcattgccgacttcgacgacaaacaaatcgagcaagcgctggctgatgtcgacgtccccattgttggggttggtggctcgtatcaccttgccgaaagttacccacccgttcattacattgccaccgataactatgcgctggttgaaagcgcatttttgcatttaaaagagaaaggcgttaaccgctttgctttttatggtcttccggaatcaagcggtaaacgttgggccactgaacgcgaatatgcatttcgtcagcttgtcgccgaagaaaagtatcgcggagtggtttatcaggggttagaaaccgcgccagagaactggcaacacgcgcaaaatcggctggcagactggctacaaacgctgccaccgcaaaccgggattattgccgttactgacgcccgggcgcggcatattctgcaagtatgtgaacatctacacattcccgtaccggaaaaattatgcgtgattggcatcgataacgaagaactgacccgctatctgtcgcgtgtcgccctttcttcggtcgctcagggcgcacggcaaatgggctatcaggcggcaaaactgttgcatcgattattagataaagaagaaatgccgctacagcggattttggtcccaccagttcgcgtcattgaacggcgctcaacagattaccgctcgctgaccgatcccgccgttattcaggccatgcattacattcgtaatcacgcctgtaaagggattaaagtggatcaggtactggatgcggtgggcatatcacgctccaatcttgagaagcgttttaaagaagaggtgggcgaaaccattcacgccatgattcatgccgaaaagctggagaaagcgcgcagcctgctgatttctactaccttgtcaattaacgagatatcgcaaatgtgcggttatccatcgctgcaatatttctactctgtttttaaaaaagcatatgacacaacgccaaaagagtatcgcgatgtaaatagcgaggtcatgttgtagcgatgatgagaattatcggcgtcgcatcaggtaactcagcacaaccacctgatacgagcaaaagccttatccgcctgacaagtcggataaggctcgaggaaatgcaattacatatgcgccgcgattaaccgttggttatcctggtacattgcgaacaggtagttgttataactcttccctttggtcgagtagcccttcagcttgtgaatcatcgctgtggcagtcacttcctgatccgctttacgcagttgtgcacgcgatttacggaacgaagagtaagccgggtgcgtattgaggttagtgacataggcgctcaccgattctttgacagaactaaactgtgagtaccctttcactttacccggcgcattggtacaacgtcctttcatgcatttcatgccgaacaggttgttgttgttgcgcgccagctttgacgttccccaaccgctttctgctgcagccatcgtcgccaccatactggtagggataatgtctacgcgttcaagcaaggtattccacgggatttttcgcgtattaccagaccacttcaccttgtagcgtttggcgatgtctttcagacgcgcacgctcagcaggtgaccattggccctgatactgttttgaaatcagccagttacgttccgcagtaatggccgcattttggctggtaatgtaaggcattacagtccggagaaacgcctttttccttggtgttccggaagggtattttcgcaaatcaggaagtgaactactctttgcactattgcgagaatactcttgtttactgcttacctgtttattactagctttagttaagtgggacttttgactcgctgttgttgtgtgcgtcttcgctaacacctcactcgaaaacaccagagtgagtaacataagaatcatcgccccatatcgtcgtatgggagtcaaaatcatcaggtctcctggtcggatttaatcattccaacaccttatattttttacaaatttgagagttgaatctcaaatcatatcaaaaatagctgtcaagagcaccccaaggaatagtccaaatctgaaactatgtcacgagttaacgattcagattggcgctaaatcgcagaaaatgtggggtttatcgcaaaattcagccgttttttgcgcgcgatcgctcacccttgcttctcatcctgtggacttaccgctcagggatgagttttgtctggcttatcgctggcaaactgtctgaaatcgcagcaataaggactcatccgccatgaaactcgccgcctgttttctgacactccttcctggcttcgccgttgccgccagctggacttctccggggttccctgcctttagcgaacaggggacgggaacatttgtcagccacgcgcagttgcccaaaggtacgcgtccactaatgctaaattttgaccaacagtgctggcagcctgcggatgcgataaaactcaatcagatgctttccctgcaaccttgtagcaacacgccacctcaatggcgattgttcagggacggcgaatatacgctgcaactagacacccgctccggtacgccaacattgatgatttccctccagaacaccgtcgaaccggtagcaagcctggtccgtgaatgcccgaaatgggatggattaccgctcacactggatgtcagcgccacttttgcggagggagccgctgtccgggattattacagccagcaaattgcgatagtgaagaacggtcaaataacgttacaacccgctgccaccagcaacggtttactcctgctggaacgggcagaaactgacacatccgcccctttcgactggcataacgccacggtttactttgtgctgacagatcgtttcgaaaacggcgatcccagtaatgaccagagttacggacgtcataaagacggtatggcggaaattggcacttttcacggcggcgatttacgcggcctgaccaacaaactggattatctccagcagttgggcgttaatgctttatggataagcgccccatttgagcaaattcacggctgggtcggcggcggtacaaaaggtgatttcccgcattatgcctatcatggttattacacacaggactggacgaatcttgatgccaatatgggcagtgaagccgatctacggacgctggttgatagcgcgcatcagcgcggtattcgtattctctttgatgtcgtgatgaaccacaccggctatgccacgctggcggatatgcaggagtatcagtttggcgcgttatatctttctggtgacgagctgaaaaaaacgctgggtgaacgctggagcgactggaaacctgccgccgggcaaacctggcatagctttaacgattacattaatttcagcgacaaaacaggctgggataaatggtggggaaaaaactggatcagaacggatatcggcgattacgacaatcctggattcgacgatctcactatgtcgctggcctttttgccggatatcaaaaccgaatcaactagcgcttctggtctgccagtgttctataaaaacaaaacggatacccacgctaaagacatcgacggctttacccctcgcgattacttaacccactggttaagtcagtgggtccgcgactatgggattgatggttttcgggtcgataccgccaaacatgttgagttgcccgcctggcagcaactgaaaaccgaagccagcgctgcacttcgcgaatggaaaaaagctaaccccgacaaagcattagatgacaaacctttctggatgaccggtgaagcctggggccacggcgtgatgcaaagtgattactatcgccacgacttcgatgcgatgatcaatttcgattatcaggagcaggcggcgaaagcagtcgattgtctggcgcagatggatacgacctggcagcaaatggcggagaaattgcaggatttcaacgtgttgagctacctctcgtcgcatgatacccgcctgttccgtgaagggggcgacaaagcagcagagttattattattagcgccaggcgcggtacaaattttttatggcgatgaatcctcgcgtccgttcggtcctaccggttctgatccgctgcaaggtacgcgttcggatatgaactggcaggatgttagcggtaaatctgccgccagcgtcgcgcactggcaaaaaatcagccagttccgcgcccgccatcccgcaattggcgcgggcaaacaaacgacactttcgctgaagcagggctacggctttgttcgtgagcatggcgacgataaagtgctggtcatctgggcggggcaacagtgacttttccggcttcccgttcgtcagtacctcgggaagccgccaaccaggataaaatgtcagccctaatcagcattgcaggataaagcaccgctcactcttcaacagaccgatttgcaccccagcaaatgtagcgttattgttaccttccttgctacagagttcgacagatatcccgctatgacattctccctttttggtgacaaatttacccgccactccggcattacgctgctgatggaagatctgaacgacggtttacgcacgcctggcgcgattatgctcggcggcggtaatccggcgcagatcccggaaatgcaggactacttccagacgctactgaccgacatgctggaaagtggcaaagcgactgatgcactgtgcaattatgacggtccacaggggaaaacggagctactcacactgcttgccggaatgctgcgcgagaagttgggctgggatatcgaaccacagaatattgcactaacaaacggcagccagagcgcgtttttctacttatttaatctgtttgccggacgccgtgccgatggtcgggtcaaaaaagtgctgttcccgctggcaccggaatacattggctacgctgacgccggactggaagaagatctgtttgtctctgcgcgtccgaatattgaactgctgccggaaggccagtttaaataccacgtcgattttgagcatctacatattggcgaagaaaccgggatgatttgcgtctcccggccgacgaatccaacaggcaatgtgattactgacgaagagttgctgaagcttgacgcgctggcgaatcaacacggtattccgctggtgattgataacgcttatggcgtcccgttcccgggtatcatcttcagcgaagcgcgcccgctatggaatccgaatatcgtgctgtgcatgagtctttccaagctggggctacctggctcccgctgcggcattatcatcgccaatgaaaaaatcatcaccgccatcaccaatatgaacggcattatcagcctggcacctggcggtattggtccggcgatgatgtgtgaaatgattaagcgtaacgatctgctgcgcctgtctgaaacagtcatcaaaccgttttactaccagcgtgttcaggaaactatcgccatcattcgccgctatttaccggaagatcgctgcctgattcataaaccggaaggagccattttcctctggctatggtttaaggatttgcccattacgaccgagcagctctaccagcgcctgaaagcacgcggcgtgctgatggtgccggggcacaacttcttcccgggactggataaaccgtggccgcatacgcatcaatgtatgcgcatgaactacgtaccagagccggagaaaattgaggcgggtgtgaagattctggcggaagagatagaaagagcctgggctgaaagtcactaaaaattgcctgatgcgctacgcttatcaggcctacatgatttctgcaatatattgaatttggtagaatttgtaggccggataaggcgttttagccgcatccggcataaacaaagcgcactatccctgcgttgagaaacgccggaaaaacgtttcaaacaggctgctgccgtagccgatgtcgctgcactttctcgacatccatgcactgcaacgcctttgtcgggcaggcttcaacacaggccggccccgtcgcccgatgccagcacagatcgcacttaatcgccctcgcctttttgcgcgaagaaacgacctccatcgcaccaaacgggcaagccagcatacagcttttacagccaatgcaacgtgattgttcaacgaaaatatgcccatgttcgcggcttatcgcgtcaacagggcagacattcgcgcacggtgcatcttcacactgatgacaggctactgccgtggtccagctgtggtctttaataacacgaatacgggaaataaactcgtctggtgacaacgcagcgcaatcctgattctcctgatgcgacactgcgcaagccacttcacaggtacggcaaccgatacatttcgtcgcatccgcaataataaaccggttcatgatcactcctttgcactaaaacagcagagtgccagagagcgcgtccctactgctttgatccaacgaaggaaatgttaaagttttggcacttgtccaaagggttatgtaatcgcgccctggtcgtccctgacagtaaatcccagttcattagaaatagcctgcgcggtttcacgcagtggtttcaggagatttttctctcccacctgtttcagacgtgatgtcgaaagcgaaatcgacacggcgtacggcacccgcccatgaatatcaaacaccggaacagcaatacaggagacgccgagttcgttttcttctctgtccatcgccgctccactttcacgaatgtgcgccagttcgtcgaacatcgcgggcagctcggtaatggtattgcgggttaacggctggatctcatgctgatggctttcccagtatgacttcacgtagtccgggtgaccaaacgccatgtagatcttgcccattgcggaacagtagagcggcatatgctggcctatataggcacgggttcgcagcatcccggttgtgggttccaacttataaatcaaaatagcgtgatcgtcttcgcggctggagaagttaatagtttcaccagtggcgatgttcagagcctcaagatgcggagcggcgatatgaatgatattcagcgaagatagcgccttctgcccgacggcaataaatttggtggtcaggcgataactccctgcggcgggcgcggtggtcacatagccgcaggactgtaatccctgcaataagcgatggacggtactcttatttaaaccagccagctccgaaagatgcgccaacggacaaccgtttggatagttgctcaaaatctcaatcagcatcaacccacgaaacagactctggcttccggctgggcgctctttttcctgcgccatctcgttctctttttttcccatcacttctttccccattttgtcgcgtcctgatggtagcgcaaagtgtgccgtagttcacgatctcgacagataatttataaccacttgatttttaagttttttgaaattcatcaatcagattgctttgttaaaaagtgatcgatatatttgaaatcaagtttcgtatattgaaattttaagccaaaaaagcgatcaaaaaaacaaggaagcctgggatgaaagtgacatttgagcagttaaaagcagcctttaatcgggtcttaatttcacgcggcgttgacaacgaaacggctgacgcctgtgcagagatgttcgcccgcaccaccgaatccggcgtttattctcacggcgttaatcgtttccctcgtttcattcaacaactggaaaacggcgatatcattcctgatgcccaacccaaacgtataaccagcctcggcgcaattgaacagtgggacgcccagcgttcgatcggtaacctgacagcgaaaaagatgatggatcgcgccattgaactggctgccgatcacggtattggtctggtggcactacgtaatgccaaccactggatgcgcggcggcagctacggctggcaggcggcggaaaaaggctatattggcatttgctggaccaactccatcgccgtaatgccaccgtggggcgcaaaagagtgtcgcatcggcaccaacccgctgatcgtcgccattccttccacgccgatcaccatggtcgatatgtcgatgtcgatgttctcttacggcatgttagaagttaatcgcctggcaggtcgtcagctcccggtagatggtggctttgatgatgagggcaatttgaccaaagaacctggcgttattgagaaaaatcgccgcattttgccgatgggctactggaaaggttcgggcatgtcgattgtgctggatatgatcgctaccctcctttctgacggcgcatcggttgccgaagtcaccgaggacaacagcgacgaatacggcatttcacaaatttttattgccattgaagtggacaagcttatcgacggtcccacccgcgatgccaaactgcaacgcattatggattacgttaccagtgccgagcgtgctgacgaaaaccaggctattcgtttacccggccacgaatttactaccctgctggcagaaaaccgccgtaacggtattaccgttgatgacagcgtgtgggcaaaaatccaggcgttataaggagataagccatgatttttggacatatcgcgcagcctaatccgtgccgtttgcccgccgccattgaaaaggcgctcgattttctgcgcaccaccgacttcaacgccctggaaccgggcgttgtcgaaatcgacggcaagaatatttatgcgcaaattatcgatttaaccacacgcgaggcggtagaaaaccgtccggaagtgcatcgtcggtatatcgatattcagtttctggcgtggggtgaagagaaaatcggcattgccattgatacgggaaacaataaagtcagcgaatcactattagagcagcgcgatattattttttatcacgatagtgaacatgaatcatttatagaaatgataccgggtagttacgctattttcttcccgcaggatgtacatcgcccggcatgtaataaaaatgccactacggcaatacgcaagatcgtggttaaagtggccctcgctgctttataaaaaatgattactggagcacataatgaaaacgaataatgccggttatattatcggcgcgtatccctgtgcaccttcttttcaccaaagaagtgaagaggaagagaaggatttctggcgacaattatctgagactccagacattttggggctggaacaaccttgcctggaaaattttcacccgctgggcgatcaatggttactccgtcatacgccagagagctggaaatttgtcgtcaccgcagtgatggaaaccatgcgtcgccgcagcgaaaacagcgggtttggtctcgcctccagtgatgaagaacagcgccaggcctgcgtggcgtactatcgccacctgttcaataaaatcaactcattgcaggctaataaagtgctcgcactggagctccaggctgcaccgttagcaacgaatcctaatgttatgcaagcgacggacgcttttgcccgctcattgaaagaaatcgccagttgggactggccgtgcaagctggtgctggaacactgcgacgccatgacatcttcttccccccgaaaaggctttttgcctttagaaaatgtgctggaagttattaccgattatgacatcagcatctgtatcaactgggcgcgctctgccattgaagggcgcaatacaacgctgccgctgacccacacccaaatggcgaaacaagccggaaaactcggcgcgttaatgttctctggtacgacgctaaacggggcatacggcgaatggcaggatttacacgcaccgtttgcaccattctgcgcagaaagcctgatgaccacagatcatgttcgcgagttatttaatgtagcagaatcgtcaacattgcattttgctgggatcaagctactggaaataaatgcgacggctgatgtgcaccatcgcatcgaaatattacgcaacggcattcactctctgaatgaatctcgttaaacagaaccatttatatatcactttgaatatctaattagccgttttctgataattattacgaatattaacaacattagcgcataaaaaatattgcataaccagaaggactcgttatgaaacggatactcgaaggcattcttgcgatcatcatcgcaatactgtcttgtattatttttattaatatcattcttcgatatggattccacacaagtatattatcgattgatgaattatcccgacttttatttgtctggttaacctttattggcgcaatcgttgcttatatggacaacagccatgtgcaggttacttttttagtcgaaaaactctcaccggctaatcaacaacgtgtttcgctgctaacccatacgctcattttattgctgtgtctggggctggcctggggcgctatagaaaaaacagcgcaagactggagcaacttatcgcccattcttggcgtccccattggcttaatgtacgccgccgctatccccaccagtctgattatcgcattgctggaattgcgtcacttataccggcagttcacaaatacccccagccgaaaccaacaaggagcctgacgatgacaatccttatatttattgtcagtttgttaggggctatcgcaattggcgttcccatcgcctgggcattattactgtgcggcatttcattgatgttctggatggatatctttgatgtgcaaattctggcacaaacgttggtaaatggcgcagacagcttctccctgttagccatccccttctttgtactggcgggtgagatcatgaacgcgggcggcctgtcgcaacgtatcgtcgacttgccaatgaaactggtaggccacaggccaggcggtctgggttacgtgggcgtgctggcagcgatgatcatggcaagcctgtccggttctgcggttgctgataccgcagctgtcgcggcgctgctggtgccgatgatgcgccaggccaactatccggtaaaccgcgccgccgggcttatcggttccggggggattattgcggccattatcccgccttccataccactcattatcttcggcgtctccagcggactctccatcagcaaactgtttatggcgggcattgcgccaggcatcatgatgggcgtcacgctgatggttacctggtggtggcaggcaaaacgactgaatttaccttgtcagccgaaagcctcactgcgagaagtctggcaatccttagtttccggtatttgggcgctctttttaccgataattattattggcggtttccgttcggggttatttacaccgaccgaagcaggcgcggttgccgccttctacgctctgttcgtctcggtggtggtctatcgcgagatgaccttctccacgctttatcatgtgctgattaacgcggcaaaaaccacatccgtggtgatgttcctggtggcctctgctgcggtatctgcatggcttattacgatcgccgaattacccatgatggtatcggagctattacaaccgttggttgattcgcctcgcttattattcatcgtcattatgctcgctattatggtgatcagtacggtcatggacttaacgcctaccgtattaattcttacaccagtattaatgccattagtgaaagaagcgggaatagatccggtctatttcggcatcatgtttattatcaactgttcaatatcactgattacgcctccagtcggtaatgttcttaacgtggtatgcggcgtggcgaaacttaaatttgacgatgcggtaaaaggcgttgcgccttacgtcatggttttattcatgttgttagcattatttatttttataccggagctcattaccgctcctcttaaatggatgagttaaaaggaaatcataatgaaattacgttctgtaacctacgctttattaattgccggagtggcgacgttcagcacatcttctctggcggcacaatcattacgtttcggttatgaaacctcacaaaccgattcacaacatattgcggcgaaaaaatttaatgaattactgcaggaaaaaaccaaaggcgaactgaaattaaaactgttcccggatagcacccttggtaatgcgcaggcgatgatcagcggcgtgcgtggcggcactattgatatggagatgtctggctctaacaactttacgggactctcgcccgtcatcaacctgctcgatgtcccgttcctgttccgcgataccgctcacgcgcataaaacgctcgacggcaaagtcggtgatgacctgaaagtctcccttgaaggtaaggggctgaaagtactggcctactgggaaaacggctggcgcgatgtcaccaactcgcgtgcaccggtcaaaacgcctgccgacctgaaagggttgaaaatccgcaccaacaacagcccgatgaatatcgctgcatttaaagtttttggcgctaacccgatcccgatgccgtttgccgaagtctataccgggctggaaacccgcactatcgacgctcaggaacacccgatcaacgtcgtctggtcagcaaaattttatgaagtgcagaagtacctttctctgacccatcacgcctattcgccgcttctggtggtgatcaacaaagcgaagtttgatggcttaaccccggagttccagcaagcactgatctcatctgcgcaggaagcgggtagctatcagcgcaaactggtcgccgaagatcagcaaaaaatcatcgacggtatgaaagaagcgggcgtggaagtcatcaccgatctcgaccgcaaagcctttagcgatgcgctgggtacccaggtccgtgacatgtttgttaaagatgttccgcagggtgctgatctgctgaaagccgtggatgaggtgcaataaaccatgacgcaatactggctggggttagattgtggcggtagctggctgaaagccgggctgtatgaccgagaaggccgggaggcgggcgtgcagcgcctgccgctgtgcgcattaagtccacagccaggctgggcagagcgcgacatggcagaactgtggcaatgttgcactgctgtcattcgcgccctgcttacccattccggcgtcagcggggaacaaattgtcggtatcggcatctccgcgcagggaaagggcttatttctacttgataaaaacgacaaaccgctcggtaacgccattttgtcctcggatcgccgggcgatggaaatcgttcgtcgctggcaggaagatggcatcccggaaaaactctatccgctgacccgacaaaccttatggaccgggcatccggtgtcgctgttacgctggctgaaagagcacgaaccagaacgctacgcgcaaattggctgcgtgatgatgacgcacgactacctgcgctggtgtttaaccggcgtcaaaggttgtgaagagagcaatatttctgagtccaatctctacaacatgagtcgcggggaatatgacccgtgccttaccgactggctggggattgctgaaatcaatcacgccctgccgcctgttgtcggatctgccgaaatctgcggggaaatcaccgctcagacagccgtactgaccggtctgaaagcgggtacccccgttgtcggcggcctgtttgatgtggtttccaccgcactctgcgccgggctcgaagacgaattcaccctcaatgcggtgatggggacctgggcggtgaccagcggcataacccacggtttacgtgacggtgaagcgcatccgtatgtctatggtcgctacgttaacgatggtcaatttatcgttcacgaagccagccccacctcttccggcaatctcgaatggtttaccgcacagtggggagaaatctcatttgctgagattaatcaggccgtagccagtttgccgaaagccggtggcgatctctttttcctgccgttcctgtacggcagcaacgccggactcgaaatgaccagcggtttctacgggatgcaggccattcacacccgtgcacacctcttacaggctatctatgaaggggtggtgttcagccatatgacccatctcaaccggatgcgcgaacgttttactgatgtgcacaccctgcgcgtcactggcggcccggcgcactccgatgtctggatgcaaatgctggcggacgtcagcggtctgcgtatcgagctgtcgcaggtggaagaaaccggctgctttggtgcggcacttgccgcccgcgtcggtaccggggtttatcgcgatttcagcgaagcccaacgtgacttacagcacccggtacgcaccctgctgccggatatggccgcgcatcagctttaccaacaaaaataccaacgctatcaacatctcattgccgcacttcagggttatcacgcccacatcaaggagcacacattatgagtcgaccacttctgcaactggccctcgaccactcatcacttgaagccgcgcagcgcgacgtgacgcggttaaaagacagcgtcgatattgtcgaagcaggcaccattctctgtttaaacgaagggcttggcgcagtgaaagccttgcgcgaacagtgccctgacaaaatcatcgttgccgactggaaggtcgccgacgcgggtgaaacgctcgcgcaacaggcatttggcgcaggcgctaactggatgaccatcatctgcgccgcgccgctcgccacggtggaaaaaggccacgcgatggcgcaacgctgcggcggtgaaatccagatcgagctgttcggcaactggacgctggacgatgcccgtgactggcatcgtattggcgtgcggcaggccatttatcatcgtggtcgtgacgcgcaggccagcgggcaacagtggggcgaggccgatctggcacgcatgaaagcgctttccgatatcggccttgagctttccattaccggcgggattacccctgctgacctgccgctgtttaaagagatccgcgtgaaagcgtttattgccggacgggcgctggcaggcgcagcaaatccggcgcaagtggctggcgatttccatgcgcaaatcgactccatctggggaggcaagcgtgcgtaatcatccgttaggcatttatgaaaaagcgctggcgaaagatctctcctggccggagcggctggtgctggcaaaaagctgtggttttgattttgtcgaaatgtcggtggatgaaaccgacgaacggttgtcacgtcttgactggagcgccgcacaacgtacttcgctggttaccgcgatgatcgaaacgggtgttgctattccgtcaatgtgcctgtccgcacatcgtcgttttccttttggtagccgggacgacgccgtgcgccagcgggcgcgggagattatgagtaaagcgattcgcctggcgcgcgatctcggcattcgtactattcaactggcaggttacgacgtctattacgaagaccacgacgaaggcacccagcaacgttttgctgaagggctggcgtgggcggtcgaacaggcggcggcatcacaagtcatgctggcagtggagattatggatactgcgtttatgaactccatcagcaaatggaaaaaatgggacgagatgctcgcctcgccgtggttcaccgtctacccggacgtcggcaacctcagcgcctggggcaatgatgttcccgccgaactgaaactgggcatcgaccgtatcgccgccatccacctgaaagacactcaacccgttaccgaacatagccccggacagttccgcgatgtgccgtttggcgaaggctgtgtcgattttgttggcatcttcaaaacgctgcatgagctgaactatcgcggatcatttctgattgaaatgtggaccgaaaaagccaaagagccggtgctggagattattcaggcgcggcgctggattgaagcgcgtatgcaggaggccggatttatatgttagagcaactgaaagctgacgtgctggcggcaaacctggcgcttcccgttcatcatctggtgacgttcacctggggcaatgtcagcgcgatagacgaaacgcggcaatggatggtgattaagccttccggcgttgagtatgaggtaatgaccgccgacgatatggtggtggttgagatagccagcggcaaggtggtggaaggcagcaaaaagccctcttccgacacgccaacgcatctggcgctttaccgtcgctttgcggagattggcggcatagtgcatacccactcgcgccacgccaccatctggtcgcaggccggacttgatctccccgcctggggcactactcacgccgattatttttacggagccatcccctgcacgcgcctgatgaccgcagaagagatcaacggcgagtatgaataccagaccggcgaagtgatcattaaaaccttcgaagagcgtgggttgaacccggcacaaatcccggcggtactggtgcattctcacggcccgttcgcctggggaaaaaatgccgccgatgcggtgcataacgccgtggtactggaagagtgcgcctatatgggtctgttctcgcgccagcttgcgccacagctccctgcgatgcaaaacgaactgctggataagcactacctgcgtaagcatggggccaatgcctattacgggcagtagccatacctgatagtgcccggcaatacacgccgggcagcctttcacatcagaacagccccaacggtttatccgagtagctcaccagcaggcacttggtttgctggtaatgctcaagcatcattttgtgggtttcgcggccaatgcctgattgtttgtagccgccaaacgccgcatgtgccgggtaagcgtgataacagttggtccacacgcgcccagcctgaatgccgcgccccatcttataggccagattaccgttgcggctccagacgcccgcgcccaggccatattgcgtatcgttcgccagctccagcgcttcttctatcgttttgaaggtggttaccgccagcaccgggccaaaaatctcctcctggaacacgcgcatattgttctgaccaaacaaaatcgtcggttcgaggtagtagccgtctttcagttcgccttccagcagcttgcgccgcccgccggtgagcacatcagcgccctcttttttaccgatatcaatgtagttgaggatggtttccagttgcccgtgagaaacctgcgcgcccatttgcgtcacgctgtcgagcgggttaccgctgcgaatgctttcgacacggcggatggcgcgttccataaagcgttcgtagatagactcctgcactaaagcacggcttggacaggtgcaaacttcgccctggttaaaggcaaacagtgcaaagccttccagcgctttatcgaaaaaggcatcttcttcatccatcacatcagcaaagaagatatttggcgatttgccgcccagctccagcgtcaccggaataatgttttgcgtggcgtattgcataatttgttgacccacttccgttgagccggtaaacgccactttggcgatgcgtttcgaggtcgccagatattcgccaatttccccacctgcgccgttgaccacgttcaccacccctggcggcagtaaatcaccgacgatttccattagcagcagtacagaaagcggagtaagacgtgcgggtttcagcaccacacagttgccagccgccagcgcgggagccattttccagctcgccatcagcagcgggaagttccacgggataatctgccccaccacgcctaacggctcatggaaatgataggccacggtttcgctatcaatttcactgatcccaccttcctgcgcccgaatacacgaggcaaaatagcgaaaatgatcaatcgccagcggcacgtcggcagcactggtttcgcgaatgggtttaccgttatcccaggtttctgccgtcgctaaaagttcaaggttttgttccattcgatcggcaatcttaaacagaatcgccgcgcgatcctgcaccgaggtgtgcgcccatttatctttcactttgtgcgcagcatccagcgccagatcgatgtctcgtttgcccgaagacgccacttcgcacagtagctgcccggtcaccggcgtcaggttctggtaatactcgccgtcggcaggggctacccattcgccgccaataaagttgtcgtagcgggcttttaatttgagggggaaaccatactcgccgggcttaatctgtgctgaagggggattattggtcatgatcgtctccttgcggtgtgaggtataacaagggtagacgtgactggcgaaatcttcgccagtcggtaacagctttacgacggctatcacgaatttacgggcaaaagctacagcgggtagtgtgcgacgtacactgcttgctggttattaattcttttctcttgcgcgaatccttctttaacaattgtccgtaaatcggtccgcgccgtattatccgagacgctcagactcacactaatttcagcaactgtgtactctttccccggattggcgagcatcacattcaggagcgttacctggcgcggattcaggcgtttaagcacaccagagctaaacagcacactatcgagttttgcgcttcgttgtgtaatttcatcgatatgctgctgccagttttgcagagcacgtttaatgacacccgcctgatattcaaggaaataagtcagatccataccatctgattcagtgtactggtagctggcggcatatttgaccggtgcagcatgaagcaaactgctgatggaaatatatttaaagacatcgtagcccgatttcagcatataccagtaaaacagcgcccgactggtgcgcccgttgccatcccgaaacggatgttcatgggccagcataaaatgcagaatgcaggcacggaccaacggatgaatatacccttcatggctgtttaaccactggcaaactttttccagccgttccggtaacaatgccgcagcgggcggttgatgcactatattgccatcatagtcggcgatcacaacatcatctgtttcacgaaattctcccggacgatatttcgcgtcattgattccacccataccaatggcatgtaactggcgaataagcgcaggtgtcagcggttctgcgagtaagtgcggaatttccgccatcagccgggcatttcccgcaatcatatgctcgtcttcagtgcgtggcgaccgccctgtttccagcatttttctcgccaccagcgttgtagtattcgcaccttccagctgggagctggtgatcggctcttccaggcgtaactggcttaactcggctccggccccgcgtaaccgttcagtctgatctttcagcgccagcgcggtagcacgtttgtcgacaagctcgcacgcttctgcaatcaccggggtaatgttgaatccggcctgttcacccgcttcattgcaataattaattcgttggatcgccgcgttgcgcgccagacgggtaagcgtccacgccacatcgacgttttctccttttttgatgcggtactgcaactcatcaaaaggcagataacgtcctttttcatcggtaacccggttaaagcgcaggtgggccaggagttcctcacccgataagtgtgataaaggaataagtccgggaggtgatttgatagccatgtgcttatctcaaaaaagcgcaatattgagatagtgtatagcaggaaagagaaactatctcaaaaaaagcaagttttgagatagttgaaaaagcggctgacaactcgccagccgttgtgggaatgatgattacatcgctgcgcgataaatcgccataatttcttcgtgagttgcctgaatcgggttagtaaacccacacgcatctttcagggcattggttgccagcactggaatatcttcttctttcacgttcaggtcacgcaggcctgccgggatattcactttcttcgccagttcacggatggcattgatgcacgcttctgcgccttccgcgtcatttttgcctgtcacgttaacgcccatggcagcagcacagtcacgcagacgcgcagcagcgactttgctgttgaacacctgaacgtgtggcagcagaacggcattacatacaccatgtggcaggttgtagaaaccgcccagctggtgcgccatcgcatgaacataacccagagaagcattattgaacgccataccggcgaggaactgggcataagccattgcttcacgcgctttagcattgctgccatcttcaacggctaacggcaggttttcggcaatcatggtcacggctttcagtgcacaagcgtcagtgatcggcgtggcggcaatagaaacatacgcttcgatagcgtgcgttaaggcatccatacccgttgcagcggtcagtgacttcggcataccgatcatcagagaggagtcattgacagaaagcagcggagttacatgtttatccacaatcgccattttgatgtgacgcgcttcgtcagtgatgatgcagaaacgggtcatttcagaggccgtacccgccgtggtgttgatggcgatcatcggcagctgcggttttgcagagcggtcaacgccttcataatcgcggatgtcaccgccgttggctgcaaccagcgcaataccttttgcgcagtcgtgtggagaaccaccgcctaaggaaatcacgctatcgcaattattttctttaagtaatttcaaacctgcggcgacgttttccgtggtggggttaggttgggtgccatcataaataacgctaaaaatattgcgttcttccagtgctttttgcacatcacccgccatacccaatttcgttaatatgttgtcggtgacaattaaggtacgggtaaatccataatctgccatcatattcattgcatcattcaatgaatcagcaccaataacattcacggaaggaataaaaaaggttgaagctgccataacacactcctgaaagtgtaaaaaagggcgggcagcttactgaggattttcatttgaaaatatgatcaacattaccgtttattaaaatatttttaataaaaagcacgttacattcatcaaataacgtgccttcttaacattaataagaaattttgtattaattcatatttattatgaattaatcatttccttatttttccggaaataataatgcgtcgcgcaataaatgatcatttccccgacgacgcgtaaagccaatacggtcaaaatattccagaatctgaattgccagcttgcggcctacgcctaagcgatcgcggaaatccgccgcgcaggttgaaccgcattcctgatcgagatcgcggatcatattggcaaattcgacaatccgatcgttacggtaataacgatctttgacgatcgcagtaattatcccctgttgggccgcctggcgtagcgtcaggcgcattgcctgctcgtcggttcccgtctcttttgccaggtcacgcacccaccatggctcgtcaccaaacagcggctctgctttttgccagatggcctgctgctctgcactgaagcccgctttatgatccggcagatgcagccagccgtgatgactgtggatgtcgccgctttcgcgcatcttttcaatcagcaacagtaccagcgcttcatcttccattggcaacgccatacgtcgcagacgttcgcgcccaggaccaggttcatcgcgatgttgctcatgataagtcgctaatgtatcgagaattttccgctgccagcgggcggcaactggcgcattcaacaagctgtaaccagcctgaatatagccaggctgttgcagcagttcgcgcatcccttcgccgttgagctgccgtgcccaggcgaaatccgcaaggttaaccgcgccgcgttccagatgaacagataacgcatcggcatcgctctgcgcccgtgcaagagacgccagccattgcagatattccggcttacgcttaccgcgacgcggcgggttaagcatcaccacacgcgcccccgccagcgtgttgcgggccgagatatcgcgcagcactatgcgatcgttatccgccagccacagcggcgtgtcgaacaccagctcggcaaggttatcttccagtagcgaaacacgtcccgtaacgtggctggcggcgtggtgaatatgcagcggctgccactgggtcagcggtgtatgggtttgaagctcgacaatcacccgtgtgaacggctccggcggcacatcggcaagcagccagtcgccacggttaatctgctctttttccgcatcacccgcgatgttaagcgcgatacgctgcccggcatgggcagtttctgttggctgattttgcgcatgcagcgcacgcacgcgcatcggtttatttacaccagtcagccagagtgaatcgcctactttcacttccccgcttaacgccgtaccggtgacgaccagcccggcaccttttacggtaaatgcgcggtcgatcgcgaggcggaaactatgttggctggcgtgttcacgttctggtaactgaagcagatgctcgcgcagagcatcaattccccgaccttcggttgctgcggtgataaacagttttgcctcagcaaaaccgtattcccgcagcacctcctttacctggcgttcaacctcatcaacacgcgcttcgtccacgcgatcggctttggtcagcgccactgtcagcatcgggttaccggtcagctgcaaaatcgccagatgctcacgggtctgtgccatcacaccgtcatcgcacgccaccaccaacagcgcgtgatcgataccaccaacgcccgccagcatgttggaaagaaacttttcatgaccgggtacgtcgataaaaccaggcacgcgaccatccggctgcggccagtaggcatagccgagatcgatggtcatgccgcgctttttttcttccggcagacggtcggcatttacgcccgtaatcgcctgcaacaaggttgttttgccgtggtcaacgtgtccggcagtcgcaataatcatttcaacaacatctccaaaaaccgttgctcatcttcaaggcagcgtaaatccagccacaatcgtccgtcataaatacgaccaatcaccggcactggcaattcacgccagcgggcggctaatgactcaaggtggctaccgcgtccatcatggggggtaaacgttaatgccgcgctcggcaggcgatcaaccggcagcgaaccactgccgatctgcgaaagacatggcataacctgtaccgcaaactccgcgccgtaatgtgcggcaaggggagcctgtaaacgttgtgcctggatttgaatgacctctgcgctgcgggtaagcaggcgcagggtcggtaatttttcactcagagcttcagggtgtaaataaagacgcaacgtggcttccagcgccgcgagggtcattttatccgcgcgtaatgcacgcttcagcgggtggctttgcaggcgggcgatcatctcttttttaccaacaataattcctgcctgcggcccgcctaacagcttgtcgccggagaagctcaccagactgacgcccgccgcaatcaactcctgcggcattggctctttcggcaaaccgtactggctaagatcgaccagcgagccactgcctaaatcagtcaccactggaacatccagttctttgccgagcgccaccagttccgcttcatctatcgctttggtgaacccctgaatgctgtagttactggtatgtactttcatcaacagtgcggtattttcattcaccgcctgacgataatcattcgcgtgcgtgcggttggtggtccctacttcgtgtagggtgcatcctgcctgacgcataacatcgggaatacgaaacgcgccgccaatctccaccagttcgccgcgagaaaccaccacctctttcccgctggcagtggccgccaacatcaataacaccgccgccgcattgttattaacgatacaggcatcttccgcccccgtaatacggcacagcagctgcgccagcgcccgatcgcgatgtccgcgtccggcgtcgtccagatcgtactcgagggtcactggcgaacgcatagccttcgtaacggcttccaccgcggcttccgcctgtaaagctcgcccaaggttggtatgcagcacggttcccgtcaggttgattaccggacacagcgcgctttgcgcctctttcgtcaaccgggcatcgacttcttgcgcccagttttcacaccacgcgggcagcgtctggctgtctcgaatcacttctcgcgcttcgtcaagcatctgacgcagcaattccaccacgcgggtgtgaccataagtatcacgcaaagaaaggaaggagctatcgcgcaataagcgatcaatagccggaagttgactatagagggaacgcgtttcggttgtcataggaaacctggctgatcaaggccctctcacacggagaagggcgtttaacataaccacggattgtaacgtgagatgggtcaggaggacatatcgcgcatcaagcctttggcggttcggtgcgagcaaaactttcgcggctaaacaggttttcgaccagtttgactaagtgtgggcggtcgacacaccagcctggcgcaacgcggcggaaattgagatatccgacggcacaggcaatggcgatagtcgccagattgaccgtatcggttttgagcgtgccatcgaccagatatccttccagcacatccagactgcggttgattttctcacgctgacgtaacaattcatcttcagactgctgcgccgccggacgcgcctgttcacgcaccgataccagcccggcatccataatgccatccgccagtgcctcaattttgcgcacccgcaacgactccagcggatcgcgcggcaacatcgccggagcaacattcattaattcaatatattcagcgatgatcggcgaatcaaaccagcattcgccctcttcggtcaccagcaccggcacttttcctaacgggttaaattgcgccacgccgttatccgcgttatagggcagttcattaataaattcgaacgttatgcccttttctaacaacagaatagaaagtttgcgtacaaacgggctggtgtagctaccgacgagtttcatgccgagtcctttgtgcgaggaaaaatatcagtatggctcaggctcgcgcaaaacacaggtgatacaagtctcaatgatccaaataaagataatgcatccaactggtcattcttagcagcactttccgcatcaccgaaacatggctgaaatggtcggagtaaactgccacctgggcgtatatgccgtcgggtaaggcatcgatatcagcgttagggtccagttcaatggttcccagcacaccgtccgtgccgggcacgaccgttaatgattgcaataccccctgcgcctgataagaaccgcctggcacgacaggtaaaatactggtcagtttgccgtgaaacacctgcccaggtagcgcgttaaacaccacttccgcatcatcgccgggtttcagacgtaacagcgagttttgccgaaattgggcgacaatttgccgtttttgctcggggatgaagaccatcaccggacgcagcggcaaggcagctgcgtatgtacctgggcggatcagtacctgagtgacgtagccattgctcggtgcgcgaatgacagtctgctcaaggttatattttgcttcagtaagttgcgctcttaagctcacaatctgcgattgctcgccgttaaccatactgtcgagctggctctggatctgcgcctgctccgccaccgagcctttcaccagcgcatcctgcgcgaggaaattttgccgcgcatcgtcgatgtcacgttccgagaacggattcaccgccgcctggctgcctttcaggtaacgttgataatttttaaacagacggtcgcgctccgctgaaacctgggtggtgttggcctgcgcttcagtgagctgcgcgcgcagcgtctttatattatgcgtcgccgtcatcaggtctgcctgaagcctgtcaactcgcgcctggtaacgaaccgggtcgagcttaaaaagcacctcgcccttctgaataagctgattatttttgtcggtgacttcagtaacaattcccgtcacctgtggcgtgatggggatcgctatcactgccttttgcgcggtaaaagtgtaagggtggttgtagttcatcaacaaaatcaaaccactcaccagaaacacgcctcccagcgccgccgtcgccagcgtccactgattcaccggaatgcggaagattttaaagaccgcccacgccagcgccacgtaagttaaaacaatcaatagatccataattagatctccggaaacgtggaatagtcagtctttttctcggcggcgagttggtgctccagccgggaaatccggtcagaaagtgcggcgatttccgcgtcagtcgttttctcttgcggcgtaacatgcgactgcatgccccagccgcgctccggttgatagagcgtcgcccagatccacaggaacggccagataacatgcagagtaaacaggctcacccagcccgccgtatgaatagcgtcggcatggggatggttgcgctttttggcaatcagataagggatgtcatgtatcgcgatgattccataaaaaatcaccagaaagacgaagatcagcactcccaacgcgaaatagtttagaaacatatctgcctcggattcacgtttatcagtgttgttttttggctggcagccagaagggagtcaggctgatattttgacaataatccgggttcgcgattctcgccataacaccaaagaataattttaagaggtgatgagttgcttagttacataacgatttcatgacgaaggcataacatgctgtagatcacatcaggtgaacgccgtaagaaaatatcttgtgattcagatcacaaagattcaacaaaccatcaaaataaaaatgtgacataactcacatttaaatgccatttttagcgaaaatcgccgccttgttgcttttttacacaagcattttgtgatgagcatcacgtcaattacctctctaccccctacatttatgtgactgatatcacacaaaaggccgccgactggacagttaaccgattcagtgccagatttcgcagtatctacaaggtccggctacctctgccgccacattaacaaaaaacctcgggcttccagcctgcgcgacagcaaacataagaaggggtgtttttatgtcatccgatattaagatcaaagtgcaaagctttggtcgtttcctcagcaacatggtgatgccaaatatcggcgcgtttatcgcgtggggtatcatcaccgcgttatttattccaacagggtggttaccgaacgaaacgctggcgaagctggtcgggccgatgatcacttatctcctgccgctgctgatcggttataccggtggtaagctggtaggcggcgaacgtggcggcgtagtcggtgccatcaccaccatgggcgttatcgtcggcgcagacatgccgatgttcctcggttctatgattgcaggtccgctgggcggctggtgcattaagcacttcgaccgctgggtagacggtaagatcaaatccggttttgaaatgctggtgaataacttctccgcaggcatcatcgggatgatcctcgctattctggcatttctcggcattggcccggttgttgaagccctgtctaaaatgctggcggcgggcgttaacttcatggttgtccatgacatgctgccgctggcgtctatctttgttgaaccggcgaagatcctgttcctcaacaacgctattaaccacggtatcttctcgccgctgggtattcagcagtcccatgaactgggtaaatccatcttcttcctgattgaagctaacccaggtccaggtatgggcgtgctgctggcgtacatgttctttggtcgtggtagcgctaaacagtctgcgggcggtgcggcaatcatccacttcctggggggtatccacgaaatctacttcccgtatgtgctgatgaatccgcgtctgattctggccgttatcctcggcggtatgactggcgtgttcacgctgactatcctgggcggtggtctggtttctccggcatctccgggttctatccttgctgtactggcgatgacgccaaaaggtgcttacttcgctaacatcgcgggtgtgtgtgcggcgatggcagtctccttcgttgtctctgccattctgctgaaaaccagcaaagtgaaagaagaagatgatattgaagctgctgcacgtcgcgttcaggaaatgaaagctgagtctaaaggcgcatctccgctgtctgcgggcgatgtgactaacgacctgagccacgtacgtaaaatcatcgttgcctgtgatgccggtatgggttccagtgcgatgggtgcaggcgtgctgcgtaagaaaattcaggatgcaggtctgtcgcagatttcggtcactaacagcgcgatcaacaacctgccgccagatgtggacctggtcatcactcaccgtgacctgaccgaacgcgctatgcgccaggttccgcaggcacagcatatttcgctgaccaacttcctcgacagcggcctgtacaccagcctgaccgaacgtctggttgctgcccagcgccatactgaaaacgaagtgaaagtgaaagacagtctgaaagacagctttgacgattccagtgctaatctgttcaaactgggcgcggagaacatcttcctcggtcgcaaagcggccaccaaagaagaagcgattcgttttgctggcgagcagctggtgaaaggcggttacgttgagccggaatacgttcaggcgatgttggatcgtgaaaaactgaccccgacttatctgggtgagtctattgcggtgccacacggtacggttgaagcgaaagatcgcgtactgaaaacgggcgtcgtgttctgccagtacccggaaggcgtgcgcttcggtgaagaagaagatgacattgcccgtctggtgattggtattgctgcccgtaacaacgagcacattcaggttatcaccagcctgaccaatgcactggatgatgagtccgtcatcgagcgtctggcacacaccaccagcgtggatgaagtgctggaactgctggcaggtcgtaagtaatccattcccaccctctccgcatgaagaaggtggggctaattgcctgatgcgcttcgcttatcaggcctacaacataaagcacaatttgttttgtcggtcggataaggtgtttacgccgcatccggcagtcggtgcacaatgcctgatgcgacgctgacgcgtcttatcaggcctacaggtcggtgccaaacacgtaggccggataaggcgtttacgccgcatccggcagtcggtacacaatgcctgatgcgacgctgacgcgtcttatcaggcctacaggtcggtgccaaacacgtaggccggataaggcgtttacgccgcatccggcaaaaagcccctctcctcacggagagggtttgggtgagggaaaagcctcaccccagccctctcgggtaaaaacattgatgaaggttaatactatgaaagcattacattttggcgcaggtaatatcggtcgtggctttatcggtaaactgctggcggacgcgggtatccaactgacgtttgccgatgtaaatcaggtggtacttgatgccctgaatgcccgtcatagctatcaggttcatgtggttggtgaaaccgagcaggtagataccgtttccggcgtcaatgccgtcagcagcattggcgatgatgtcgttgatctgattgctcaggtcgatttagtcactaccgccgttggccctgtcgtgctggaacgtattgctccggccatcgccaaagggctggtgaaacgtaaagaacaaggtaatgaatctccgctgaacatcatcgcctgtgaaaacatggtccgcggcaccacgcagctgaaaggccatgtgatgaacgccctgccggaagatgccaaagcgtgggtagaagaacacgttggctttgttgattccgccgttgaccgcatcgtaccgccttcggcttcggcaactaacgatccgctggaagtgacggtagaaacattcagcgaatggattgttgataaaacccagttcaaaggcgcgctgccgaacatcccaggcatggaattaaccgacaatctgatggcatttgtcgaacgtaaactcttcaccctgaatacaggtcatgctataaccgcgtacctcggaaaactggccggtcatcagaccattcgtgacgcaattctcgacgagaaaatccgcgcggtggtaaaaggggcaatggaagaaagcggcgcggtactgatcaagcgctacggctttgatgctgacaaacatgcggcatacatccagaaaatcctcggtcgtttcgagaacccgtacctgaaagatgatgtagaacgcgtaggccgtcagccgctgcgtaaactgagtgctggcgaccgtctgatcaagccactgctcggaaccctggaatatggtctgccacataaaaacctgattgaaggtattgccgctgcaatgcacttccgcagtgaagatgacccgcaggctcaggaactggcagcgctgattgccgacaaaggcccacaagccgcgctggcacagatttccggtcttgatgccaacagcgaggttgtatccgaggcggtaaccgcttataaagcaatgcaataatggtggaccaggcgcaggataccctgcgcccgaataacagattgtcagatatgcaggcaacaatggaacaaacccaggcctttgaaaaccgtgtgcttgagcgtctgaatgctggcaaaaccgtgcgaagctttctgatcaccgccgtcgagcttttgaccgaggcggtaaatcttctggtgcttcaggtattccgcaaagacgattacgcggtgaagtatgctgtagaaccgttactcgacggcgatggtccgctgggcgatctttctgtgcgtttaaaactcatttacgggttgggcgtcattaaccgccaggaatacgaagatgcggaactgctgatggcattgcgtgaagagctaaatcacgacggcaacgagtacgcttttaccgacgacgaaatacttggaccctttggtgaactgcattgcgtggcggcgttaccaccgccgccacagtttgaacctgcagactccagtttgtatgcaatgcaaattcagcgttaccaacaggctgtgcgatcaacaatggtcctttcactgacagagctgatttccaaaatcagcttaaaaaaagcctttcaaaagtaagtactttcgcttacttctcctctacctgtttcggacgataaagctgacgataatactccagacgttgtagatataacggcacgctttcatcaggtattccggacggaatcgcgttacggggaggtagttttttcagatactcccggaacgcctggctggatgccatgaaatctacggctttatcgataagaagcggaacgttttcacctaatttgcccatgatgatatctccgtattaccccgcgccgggaatgcgcggccgccaattttagtttagatcccggtataaatgacattaaggaaaacgtgctcaatcctcaataatcacctgcttctgttgactatcttttttctttaaatttcttaactaatcaatgtattgggtgattttttaacgcataaatggttacaatctggaactattacaatgccatcagttgtgaacaaagcacctggtcgcgcatactagaggctataaatttatctctatcagaagtcatcacatgaaagaagtcgaaaaaaacgaaatcaaacgtctcagcgatcgtctggacgccatccgtcaccagcaggccgatctgtcgctggttgaagccgcagacaaatatgccgaactggaaaaagagaaagccactctggaagcagaaattgctcgcctgcgcgaagttcacagccagaaactcagcaaagaagcgcagaaactgatgaagatgccgttccagcgtgcaatcaccaaaaaagagcaggctgatatgggcaagctgaaaaaaagtgttcgcggactggtggttgtgcacccaatgaccgcgctgggccgcgaaatgggcctgcaagagatgacagggttctcaaagactgcgttttaagttcctttctcgtcgctgtaatcacagcctctcaccatttactcgctcctgctggcacatgcaggagcctgtttcagagatcgaatctttataacgttcttaacattatatattcaactccacctacacttctgagcgatcgtagcaggctaaattctgaaaatcaggtacacattaaagaatgatgtatcaatatcaacaatgaatttccgcatatcaatgctcgaaacataattaattatttaaatttttcaatcagcttcgcaaattccacaataaaacatcactcaactgaatatttacctttccctgccctgtgcctttatccggtgaaacatttgacatcgattgacaccgatcattaaaatccgcgcgattaatattattggctacaaactgaaatcgtttgacatttaataacatattcgcacaaccaattaatacaaaaactctctaacaaatttattttgcggatatgccccattccaatcattcataaaaaaaatgattgtgccgtaattatcaactgtatcgggattatgaaaaggaattcatcctatgaacctaaagaaaacactgttaagcgtgttaatgatattgcaactttgcttattggtagggtgtgactatattgaaaaagcgagtaaggtcgacgatctcgttacacagcaagagttgcaaaaaagcaaaattgaggcgcttgaaaaacaacaagaactcgacaagcgcaagatagaacactttgaaaaacaacaaactaccatcataaacagtaccaaaacgctcgctggtgtggtgaaggcagttaaaaacaaacaggacgaatttgtctttacagaatttaacccggcacaaacccaatactttattttaaataacggctctgttggtttggcagggaaaatactgtctattgacgcagtagaaaacggcagtgttattcgtatttcactggttaacttattaagtgttcctgtatcaaatatgggtttctacgcaacatgggggggagaaaaacccaccgacatcaacgcattagcaaaatggcagcaattgctatttagtaccgcaatgaactcctccctgaaattattaccaggtcaatggcaagacattaatttgacgctaaaaggtgtctcgcccaacaacctcaaatatctgaaattagccatcaacatggcaaatattcagttcgaccgtcttcaacctgctgaatctccacagcggaaaaacaaaaaataaatgcagcttctgcgcttatatcaaggaatagagagcatcaataatgaacaaaatatttaaagttatctggaatccggcaacaggcagttacaccgttgccagcgaaacggcgaagagccgtggtaaaaaaagcgggcgcagtaagctgttaatttctgcactggttgcgggtgggttgttgtcgtcgtttggggcaagtgcagataattacactgggcagccaactgattatggcgatggctcagcaggtgacggctgggttgctatcggtaaaggggcaaaagcaaatacctttatgaacactagtggcgcgagtacagctttaggatatgacgcgatagccgaaggtgagtacagttctgccatcgggtcaaaaacccttgcaactggtggagcatccatggcgttcggggttagtgcaaaagcaatgggtgacagaagtgtcgcgctaggtgcatcgtcagtagcaaatggcgatcgttcgatggcttttggtcgttacgcaaagacgaatggttttacatctcttgctattggggactcctcccttgccgatggtgaaaaaactattgcgttaggaaatacggctaaagcttacgaaattatgagcatcgccctcggtgataatgccaatgcgtcaaaagagtatgcaatggcgctgggagcaagtagcaaagctggcggtgctgatagcctcgcattcggcagaaaatctacagctaatagcactggctcactggcaataggtgctgacagtagcagttcgaacgataacgccatcgcgatagggaacaaaacgcaagccctgggagtgaattcgatggccctgggtaatgcaagtcaggcatctggcgaatccagtattgcattaggtaacaccagtgaagccagcgaacaaaatgcgattgcgctggggcaaggtagcattgcaagcaaagtgaactcaatcgcgttgggaagtaacagtttgtcctcgggagagaatgccatcgcattgggagagggtagtgccgctggtggcagcaacagccttgctttcggtagccagtccagggcaaacggcaatgattctgtcgccatcggtgtaggggctgcagcagcgaccgacaattctgtcgctatcggcgcaggatcgaccacagatgcaagcaatacggtttcagttggcaacagcgcaacaaaacgcaaaattgttaatatggctgctggtgccataagcaacaccagtaccgatgccatcaacggctcacagctttatacgatcagtgattcagtcgccaagcgactcggaggaggcgctactgtaggcagcgatggcaccgtaaccgcagtaagctacgcgttgagaagcggaacctataataacgtgggtgatgctctgtcaggaatcgacaataataccctacaatggaataaaaccgcgggggcgttcagcgccaatcacggtgcaaatgccaccaacaaaatcactaatgttgctaaaggtacggtttctgcaaccagcaccgatgtagtaaacggctctcaattgtacgacctgcagcaggatgctctgttgtggaacggcacagcattcagtgccgcacacggcaccgaagccaccagcaaaatcactaacgtcaccgctggcaacctgactgccggcagcactgacgccgttaacggctctcagctcaaaaccaccaacgacaacgtgacgaccaacaccaccaacatcgccactaacaccaccaatatcaccaacctgactgacgctgttaacggtctcggtgacgactccctgctgtggaacaaagcagctggcgcattcagcgccgcgcacggcaccgaagccaccagcaaaatcaccaacgtcaccgctggcaacctgactgccggtagcactgacgccgttaacggctcccagctcaaaaccaccaacgacaacgtgacgaccaacaccaccaacatcgccactaacaccaccaatatcaccaacctgactgacgctgttaacggtctcggtgacgactccctgctgtggaacaaaacagctggcgcattcagcgccgcgcacggcactgacgccaccagcaagatcaccaacgtcaccgctggcaacctgactgccggcagcactgacgccgttaacggctcccagctcaaaaccaccaacgacaacgtgacgaccaacaccaccaacatcgccactaacaccaccaatatcaccaacctgactgacgctgttaacggtctcggtgacgactccctgctgtggaacaaaacagctggcgcattcagcgccgcgcacggcactgacgccaccagcaagatcaccaatgtcaaagccggtgacctgacagctggcagcactgacgccgttaacggctctcagctcaaaaccaccaacgataacgtgtcgaccaacaccaccaacatcaccaacctgactgacgctgttaacggtctcggtgacgactccctgctgtggaacaaaacagctggcgcattcagcgccgctcacggcactgacgccaccagcaagatcaccaatgtcaaagccggtgacctgacagctggcagcactgacgccgttaacggctcccagctcaaaaccaccaacgataacgtgtcgaccaacaccaccaacatcactaacctgacggattccgttggcgaccttaaggacgattctctgctgtggaacaaagcggctggcgcattcagcgccgcgcacggtaccgaagctaccagcaagatcaccaacttactggctggcaagatatcttctaacagcactgatgccattaatggctcacaactttatggcgtagcggattcatttacgtcatatcttggtggtggtgctgatatcagcgatacgggtgtattaagtgggccaacctacactattggtggtactgactacactaacgtcggtgatgctctggcagccattaacacatcatttagcacatcactcggcgacgccctactttgggatgcaaccgcaggcaaattcagcgccaaacacggcattaataatgctcccagtgtaatcactgatgttgcaaacggtgcagtctcgtccaccagcagcgacgccattaacggttcacaactttatggtgttagtgactacattgccgatgctctgggcgggaatgctgtggtgaacactgacggcagtatcactacaccaacttatgccatcgctggcggcagttacaacaacgtcggtgacgcgctggaagcgatcgataccacgctggatgatgctctgctgtgggatacaacagccaatggcggtaacggtgcatttagcgccgctcacgggaaagataaaactgccagtgtaatcactaacgtcgctaacggtgcagtctctgccaccagcaacgatgccattaatggctcacagctctatagcactaataagtacatcgctgatgcgctgggtggtgatgcagaagtcaacgctgacggtactatcactgcaccgacttacaccattgcaaataccgattacaacaacgtcggtgaagccctggatgcgctcgataataacgcgctgctgtgggatgaagacgcaggtgcctacaacgccagccatgatggcaatgccagcaaaatcaccaacgttgcggctggtgatctctccacaaccagtaccgatgctgttaacggttcccagttaaacgcaaccaatattctggttacgcaaaatagccaaatgattaaccagcttgctggtaacactagcgaaacctacatcgaggaaaacggtgcgggtattaactatgtacgtaccaacgacagcggcttagcgttcaacgatgccagcgcttcaggtattggcgctacagctgtaggttataacgcagttgcctctcatgccagcagtgtagccatcggtcaggacagcatcagcgaagttgatacgggtatcgctctgggtagcagttccgtttccagccgtgtaatagttaaagggactcgtaacaccagcgtatcggaagaaggtgttgtgattggttatgacaccacggatggcgaactgcttggcgcgttgtcgattggtgatgacggtaaatatcgtcaaatcatcaacgtcgcggatggttctgaagcccatgatgcggtcactgttcgccagttgcaaaacgccattggtgcagtcgcaaccacaccaaccaaatactatcacgccaactcaacggctgaagactcactggcagtcggtgaagactcgctggcaatgggcgcgaaaaccatcgttaatggtaatgcgggtattggtatcggcctgaacacgctggttctggctgatgcgatcaacggtattgctatcggttctaacgcacgcgcaaatcatgccgacagcattgcaatgggtaatggttctcagactacccgtggtgcgcagaccaactacactgcctacaacatggatgcaccgcagaactctgtgggtgagttctctgtcggcagtgaagacggtcaacgtcagatcaccaacgtcgcagcaggttcggcggataccgatgcggttaacgtgggtcagttgaaagtaacggacgcgcaggtttcccagaatacccagagcattactaacctgaacactcaggtcactaatctggatactcgcgtgaccaatatcgaaaacggcattggcgatatcgtaaccaccggtagcactaagtacttcaagaccaacaccgatggcgcagatgccaacgcgcagggtaaagacagtgttgcgattggttctggttccattgctgccgctgacaacagcgtcgcactgggcacgggttccgtagcagacgaagaaaacaccatctctgtgggttcttctaccaaccagcgtcgtatcaccaacgttgctgccggtgttaatgccaccgatgcggttaacgtttcgcaactgaagtcttctgaagcaggcggcgttcgctacgacaccaaagctgatggctctatcgactacagcaacatcactctcggtggcggcaatagcggtacgactcgcatcagcaacgtttctgctggcgtgaacaacaacgacgcagtgaactatgcgcagttgaagcaaagtgtgcaggaaacgaagcaatacaccgatcagcgcatggttgagatggataacaaactgtccaaaactgaaagcaagctgagtggtggtatcgcttctgcaatggcaatgaccggtctgccgcaggcttacacgccgggtgccagcatggcctctattggtggcggtacttacaacggtgaatcggctgttgctttaggtgtgtcgatggtgagcgccaatggtcgttgggtctacaaattacaaggtagtaccaatagccagggtgaatactccgccgcactcggtgccggtattcagtggtaatcatccattaacaaatgggtaaacgccacattgcctgatgcgctacgcttatcaggcctacggggtgattcagcactaccctgtaggccggataaggcgttcacgccgcatccggcaagataaggcgcaccagatcaacaatctgagggcaattctctgatgggaattgcccttttctttattacctctctcccagaattggccctaccaattcttcgcttatctgacctctggttcacaattccccaattaaaactcacatcaatgttgccaatgcataacatttagttaactatccattgtcattatccctacacaacacaattggcagtgccacttttacacaacgtgtgacaaggagatgagcaacagactcattacacggcgtgtgtggactgcaggagacctgcaatgaatctctggcaacaaaactacgatcccgccgggaatatctggctttccagcctgatagcatcgcttcccatcctgtttttcttctttgcgctgattaagctcaaactgaaaggatacgtcgccgcctcatggacggtggcaatcgcccttgccgtggctttgctgttctataaaatgccggtcgctaacgcgctggcctcggtggtttatggcttcttctacgggttgtggcccatcgcgtggatcattattgcagcggtgttcgtctataagatctcggtgaaaaccgggcagtttgacatcatccgctcgtctattctttcgataacccctgaccagcgcctgcaaatgctgatcgtcggtttctgtttcggcgctttccttgaaggagccgcaggctttggcgcaccggtagcaattaccgccgcattgctggtcggtctgggctttaaaccactgtacgccgccgggctgtgcctgattgttaacaccgcgccagtggcatttggtgcgatgggtattccgattctggtcgccgggcaggtaacaggcatcgacagctttgagattgggcagatggtggggcgtcagctgccgtttatgaccattatcgtgctgttctggatcatggcgattatggacggctggcgcggtatcaaagaaacctggcctgcggtcgtggttgcgggtggttcgtttgctatcgcacagtacctcagttccaacttcattgggccggaactgccagacattatctcttcgctggtatcgctgctctgtctgacactgttcctcaaacgctggcaaccagtgcgcgtattccgcttcggtgacttaggggcgtcacaggttgatatgacgctggctcacacaggttacacggcaggtcaggtgctgcgcgcctggacaccgttcctgttcctgaccgccaccgtaacgctgtggagtatcccgccgtttaaagccctgttcgcttcaggcggtgcgctgtatgagtgggtgatcaacattccggtgccgtacctcgataaactggttgcccgtatgccgccagtggtcagcgaagcgacagcgtatgccgccgtgtttaagtttgactggttctctgccaccggtaccgccattctgtttgctgccttgctctcgattgtctggctgaagatgaaaccatctgacgctatcagcaccttcggcagcacgctgaaagaactggctctgcctatctactccatcggcatggtgctggcgttcgcctttatctcgaactattccggactgtcatcaacactggcgctggcactggcgcacaccggtcatgcattcaccttcttctcgccgttcctcggctggcttggggtattcctgaccgggtcggatacgtcatctaatgctttgtttgccgctttgcaggctaccgccgcacaacaaattggcgtttctgacctgttgctggttgctgccaacaccaccggtggtgtcaccggtaagatgatctccccgcaatctatcgctatcgcctgtgcggcggtaggcctggtgggcaaagagtctgatttgttccgctttactgtcaaacacagcctgatcttcacctgtatggtgggcgtgatcaccacgcttcaggcctatgtcttaacgtggatgattccttaatgattgttttacccagacgcctgtcagacgaggttgccgatcgtgtgcgggcgctgattgatgaaaaaaacctggaagcgggcatgaagttgcccgctgaacgtcaactggcgatgcaactcggcgtgtcgagaaattcactgcgcgaggcgctggcgaaactggtaagcgaaggtgtgctgctcagtcgacgtggcggcgggacgtttattcgctggcgtcatgacacatggtcggagcaaaacatcgtccagccgctgaaaacgctgatggccgatgatccggattacagtttcgatattctggaagcccgatacgccattgaagccagcaccgcatggcatgcagcaatgcgcgccacacctggagaaaaagaaaagattcagctttgctttgaagcaacgctaagtgaagacccggatctcgcctcacaagcggacgttcgttttcatctggcgattgccgaagcttcacataacattgtgttgctgcaaaccatgcgcggtttcttcgatgtcctgcaatcctctgtgaagcatagccgccagcggatgtacctggtacccccggttttttcacagctgaccgaacaacatcaggcggtcattgacgccatttttgccggtgatgctgacggggcgcgtaaagcaatgatggcgcaccttagctttgttcacaccaccatgaaacgattcgatgaagatcaggctcgccatgcacgtattacccgcctgcctggtgaccataatgagcattcgagggagaaaaacgcatgattatttccgcagccagcgattatcgcgccgcagcgcaacgcattctgccgccgttcctgttccactatatggatgggggggcatattctgaatacacgctgcgccgcaacgtggaagatttgtcagaagtggcgctgcgccagcgtattctgaaaaacatgtctgacttaagcctggaaacgacgctgtttaatgagaaattgtcgatgccggtggcgctaggtccggtaggtttgtgtggcatgtatgcgcgacgcggcgaagttcaggctgccaaagcagcagatgcgcatggcattccgtttactctctcgacggtttccgtttgcccgattgaagaagtggctccggctatcaaacgtccgatgtggttccagctttatgtgctgcgcgatcgcggctttatgcgtaacgccctggagcgagcaaaagccgcgggttgttcgacgctggttttcaccgtggatatgccaacgccgggagcgcgttatcgtgatgcgcattctgggatgagcggcccgaacgcggcaatgcgccgctacttgcaggcggtgacgcatccgcaatgggcgtgggatgtgggcctgaacggtcgtccgcatgatttaggtaatatctcggcttacctcggcaaaccaaccggactggaagattacatcggctggctggggaataacttcgatccgtccatctcatggaaagaccttgagtggatccgcgatttctgggatggcccgatggtgatcaaagggatcctcgatccggaagatgcgcgcgatgcagtacgttttggtgctgatggaattgtggtttctaaccacggtggccgccagttagatggcgtactctcttctgctcgtgcactgcctgctattgcggatgcggtgaaaggtgatatcgccattctggcggatagcggaatacgtaacgggcttgatgtcgtgcgtatgattgcgctcggtgccgacaccgtactgctgggtcgtgctttcctgtatgcactggcaacagcgggccaggcgggtgtagctaatctgctaaatctgatcgaaaaagagatgaaagtggcgatgacgctgactggcgcgaaatcgattagcgaaattacgcaagattcgctggtgcaggggctgggtaaagagttgcctgcggcactggctccaatggcgaaagggaatgcagcttaagggttagacgaatatctgctatcctgcccccgcactaagggggcagtatgctaaacatcgtactttacgaaccagaaattccgccaaatactggcaacatcatccgtctttgcgctaataccggctttcgtctgcatatcatcgaaccgatgggatttgcctgggacgataagcgcctgcgccgcgcggggctggactatcacgagtttaccgccgttacgcgtcatcatgactatcgcgcgtttctcgaagcagaaaatccccagcgtctgtttgccctcaccacgaaaggtacgcctgctcacagcgccgtaagctatcaggatggcgattatctgatgttcggcccggaaacacgcggcctgccagcgagcattcttgatgccctgcccgctgaacaaaaaattcgtattccaatggtgccggacagccgcagcatgaacctgtccaatgcggtgtcggtggtggtgtatgaagcctggcgccagctggggtatccgggagcggtgttgagagattaagatgcggtaggccggataaggcgttcacgccgcatccggcacgatcacagaatgtcagatcccatcaccatactcaaacgtatggttaatgccgttgaaatgctgatccatatccattgacggtttatcgctatccggcttgccgacaatgcgtgccggaacgccagcggcagtggtgtgcggcggcaccggttgcagcaccacggaacctgcgccaatcttcgcgccgcgcccaacttcaatattgccgagaattttcgcgcccgcgccaatcatcacgccttcacgaattttcgggtgacggtcaccaccagatttacccgtaccgccaagcgtcacagattgcagaatcgatacgtcgttttcaatcaccgccgtttcaccaacgacgatgcctgtcgcgtggtcgagcatgataccgcgaccaatttttgctgccgggtgtatatcaacctggaacgttacagagacctggttttgtagaaaaatagccagcgcgcgacggccctgattccacaaccagtgaccgatgcgatacgcctgcaaagcatgaaaacctttcagatataacaatggggttgagtatttatcgactgccgggtcgcgggtacgcactgcctgaatatcacaggccgcagaagcaatcatttccgggtcggcggcgtaggcttcttccaccacttcacggatagcaatagcaggcataattggcgatgacagcttgttcgccagcatgtagctcaatgcactgccaaggttttcatgcttgagtagcgttgcgtggtaaaaactggccagcattggctcacagtccgccagcgttctggcttccgctttaatattgttccagacaatttccagttcttcacacgacattgcttactccacacgatgagataatgaccggctcgttctgcgcgagccgggtcatagcggtaacaaaggttccctgggtttagtggctactgcgctcgtccttgcgtgcacgacctaataaagtcaatgctgcctcgcgcgcgttttttccgcaatataatacttgataaatttcctcggttattggcatttcaacgccgaagcgatgcgccagttcgcggacttctttcgtattgcggtagccttccaccacttgaccaattttctcctgcgcgctttgtacatccatgccctgaccgagcatcatgccaaaacggcggttacgcgactggttgtcggtacaggtcagcaccagatcgcccagccccgccatgcccataaaggtggcaggatcggcacccagcgccgcgccaagacgcgacatctcagccagcccacgggtgatcagcgccgtacgcgcattcgcgccaaaaccgataccgtcggacatccccgcgccaatggcaatgacgtttttcaccgcaccgccaagctgcacaccgatgaaatccgggttgctgtaaacgcggaaacttttgccacagtgcagcaattgctggaggtcatcggcaaaggtctggtccgtcgaggccagcgaaatggccgtcggtaaacctgccgccagttctttcgcaaacgttgggccagagataaccgccagcggaatttgatcgcctaaggcctcacgcgccacgtcctgtaacagacgtccggtttctgcttccagccctttggtcgcccacaccagacgcgcatcaggacgcatcagcggtttaatctggcgcagcacttcaccaaagacatggctgggtacgacgacgagaatattacggctggctgccagcgcagtggcgagatcgctttcaagatggagcgtatcgggaaaaggcacatcggggagaaacgcggcgttacagcggtcgcgttcaagcgttgcgatatgttcagggtcatggccccagaggacaacctcgtggccatttcttgccagggtgatggcaagagcggtgccgtacgagccggcaccgatcacagtcattgaagcattacgttggttcatcaggcatcctgatgttcttcagtaccttcgccagcctgctgctgcaaatagttcatgaacagcgcatcgaagttaaccggcgcaaggttcagttgcgggaatgtaccgcgggataccatgctggtgatgcactcacgagcatacgggaacagaatgttcgggcagtatgcgcccaggcaatgtgccatctgggtgccttcgatacccgcgatggagaaaataccgccctgctgaacttcacacaggaacgcggtttcttcgcccagggaggccgttacggtaacacgcagtaccacttcgtaaacgtcatctgccagttgagaagatgccgtatccagatcaagtttaacttctggctgccaatctttctggaaaacgtgcggcgcgttcggcgcttcgaaagaaatatccttggtataaatacgttggatctggaaagtcatttcggtgttgttttgttctgacatgtgtagaaaacccttaagtgttgtccttaaaatactgcgcaatgtaatgccaacgttcacacgttatttcagcaggggatccagtccaccacgtgcatccaatgcatacaagtcatcacagccaccaatgtgctgtgcgtcaataaaaatctgtggaaccgtggtgcgaccgctgcgtttgatcatctcttcacgcttagcggcattgccatcgatcggcaactcctgaaaactcacgcccttgctgctcagcagtgcttttgcacgatggcaatacgggcaggtttctttggtatagatttcaacattggccataaattagctcctgttttttaccctgaaatttcatgttgcagggcggcagcaaaatggagtgtccccagaagcttataacaataagtcgctgggggcctaattgcagctaacggcctgcatcatgaaaaacggcaggtaaattatttgccgcgcaccaaaggcaagttttcgccagcccagccagcgacgccttctttcagtacgaatacttgcgcaaaaccagctttcgtcagcgcgtttgcaggctcctggcactgcatgccagaaccatctaccacgataaccggtttgtctttgtgcttctcaagctcaccaacattgttggctttgatttcgctcggcaacaggttgatagaacctgcgatatggcctttacggaagtcatcacgctgacgtaaatccacaaccacagcgtcttctttgttgatcagacgcgtagcttcaccacgagtaatcaccttcactttcgaggtcaggctcttaaacgtagtcacaagaaccgccaccagtaacgcgatccaggcgatactcagtatgggatgacggccaacaaattgcataatttcttgcatggggggtaacaactcccgacgtagtgattaaaaaaaccaggaaaggagtatacctgcgcagtgcggcaaatacagccagcgcgttaactggaatgcaattttgcggggcgcgacgaaaaaaaagcgtaaatctggcatctgcttgccgcgagcggtcgtatattttgatcttcagaggctattttatcgattcagctgtagtaaaattacgcaaattttgactcttgagtatgaggttgtcgcaatgtcggtttctaaaaaacctatggtactggtgattctggatggctatggctatcgcgaagaacagcaggataacgccatttttagtgctaaaaccccggtaatggatgcactgtgggccaatcgtccgcataccctgatcgacgcttccggtttggaagtcggtctgcctgaccgtcagatgggcaactccgaagtaggccacgttaacctgggtgccggccgcatcgtgtatcaggacctgactcgtctggacgttgaaatcaaagatcgcgctttctttgctaatccggtgttgactggtgcagtagataaagcgaaaaacgcaggcaaagcagtacacattatgggtctgctctccgcaggtggtgtacacagccacgaagatcacatcatggcgatggtagaactggcagctgaacgcggcgcagaaaaaatctacctacacgcattccttgacggtcgcgacactccgccgcgcagtgctgaatcctcgctgaaaaaattcgaagagaaatttgccgcgctgggtaaaggccgcgtagcgtccatcattggtcgttactacgcgatggaccgcgataaccgttgggatcgcgttgaaaaagcttatgacctgctgactctggcgcaaggtgagttccaggccgataccgccgttgccggtttgcaggctgcttatgctcgcgacgaaaacgacgagttcgtgaaagcgaccgttattcgtgcagaaggtcagccagatgcggcaatggaagacggcgatgcgctgattttcatgaacttccgtgctgaccgcgcgcgtgaaatcactcgtgctttcgtgaacgctgatttcgatggcttcgcgcgtaagaaagtggttaacgtcgatttcgtgatgctgaccgaatacgctgccgacatcaaaaccgcagtggcttacccacccgcttccctggttaacaccttcggcgagtggatggcgaaaaacgacaaaactcagctgcgtatttccgaaaccgaaaaatatgcccacgttactttcttcttcaacggtggcgtagaagagtcgttcaaaggcgaagatcgcattctgatcaactcaccgaaagtggctacctacgatctgcaaccggaaatgagctccgcagagctgaccgaaaaactggttgcggcaatcaagagcggcaaatacgacaccattatctgtaactatccgaacggcgacatggtaggtcacaccggggtgatggaagcggcggttaaagcggttgaagcgctggatcactgcgtggaagaagtcgcgaaagcggttgagtccgtgggtggacaactgctgatcaccgctgaccacggtaacgctgaacagatgcgcgatccggcaacgggtcaggcacacacagcacacaccaacctgccagttccgctgatttacgttggtgataagaacgtgaaagcggttgaaggcggcaaactttctgacatcgcgccgaccatgttgtcgctgatgggtatggaaatcccgcaagagatgactggtaagccgctgttcatcgtggaataatccctccccatgaggggaaaggcgattaataccatgacacgggccgtgaaaccgcgcaggtttgcaatcaggcccatcatctacgccagcgttctgagcgctggcgtattgttgtgcgccttttccgcccacgcggatgagcgtgaccaactcaaatccattcaggctgacatcgccgcgaaagagcgcgcggtacgccaaaagcaacaacaacgcgcaagcctgctcgcacaattgaaaaagcaggaagaagcgatctctgaagccacccgtaaactgcgcgaaacgcaaaacacgcttaatcaactgaataaacagattgatgagatgaacgcgtcgattgccaaactagagcagcaaaaagccgcccaggagcgcagcctcgccgcgcaactggatgccgcgtttcgtcagggtgaacataccggtattcagctgattctcagcggtgaagaaagccagcgtgggcagcggttacaggcttatttcggctatctcaaccaggcgcgacaagaaaccattgctcagttgaaacaaacgcgtgaagaagtcgctatgcagcgtgccgaactggaagagaaacagagcgagcaacaaacgcttttatatgagcagcgcgcccaacaggcgaagctgacccaggcgttgagcgagcgtaagaaaacactggcagggctggagtcttccatccagcaaggtcagcaacagttgagcgagctgcgcgccaacgaatcccgtctgcgtaacagcattgcccgtgcggaagccgcggcgaaagcgcgtgctgaacgtgaagcgcgcgaagcccaggcggttcgcgaccgccagaaagaagcgacgcgcaaaggcaccacctacaagccgaccgaaagcgaaaaatcgctgatgtcccgtaccggtggtctgggcgcaccgcgcggtcaggcattctggccagttcgcgggccgacgctgcatcgctatggcgaacagctacagggtgaattacgctggaaagggatggtgattggtgcctctgaaggtactgaagttaaagcgattgccgacggccgggtgattctggctgactggctgcaaggctacggtctggtggtggtggttgagcatggtaaaggcgacatgagtctttacggctataatcagagcgcactggtgagcgttggttcgcaggttcgcgcgggccagccaattgcactggtgggcagcagtggcggtcagggtcggccttcactctatttcgaaattcgccgccagggtcaggcggtcaatccacagccgtggttgggaagataagttttgtttccatttcgtcgtaacgttcttgcatttgccgctctgttggcgctctcctcccccgtaattgctggcaaacttgccatcgtcattgatgattttgggtatcgcccgcacaacgaaaaccaggtgctggcgatgccttccgctatctccgtcgctgtattacccgattcaccgcacgccagagagatggcgaccaaagcacataacagcggtcacgaagtgttgattcatctaccgatggcaccactgagtaaacagccgctggagaaaaatacgctacgcccggagatgagcagcgacgaaattgagcgcattattcgtagtgcggtcaataacgtgccctatgccgtggggatcaacaaccacatgggcagcaagatgacctctaacctgtttggtatgcagaaagtgatgcaggcgctggagcgttacaatctttacttcctcgacagcgtaaccatcggtaatacccaggcgatgcgcgccgcgcaaggcactggcgtgaaggtgatcaaacggaaggtgttcctcgacgattcgcaaaatgaagcggacatccgtatgcaatttaatcgcgcaattgacctggcacgtcgcaacggttcaaccattgccattggacatcctcacccttcaacggtacgcgtgctacaacagatggtttataacctgccgccagacattacgctggtgaaagccagcagcttgttgaatgaaccgcaggttgatacgtctacaccgccgaaaaacactgtgcccgacacaccgcgtaatccattccgtggcgtgaagctgtgcaaaccgaagaagccgatagaacctgtttatgctaatcgcttctttgaagtattaagcgaaagcatcagccagagcacgctgatcgtttacttccagcatcagtggcaaggctggggcaaacagcccgaatcggcaaaacttaacgctagcgcaaattaaaggcgctacgcgtaatgcgatggtgcgaccgcgttttgtcgcgccattgccataagcggaaagaccacagtaacgcctggtaacccaccttcacgctgcgcacattggtaatcaggcgcttatacataccggaagtaaatatctcagcaatcatccgttggcgggtaataatatccggctctttgcgcaccgcatggcaaacacgcaatgcttcgtaagttatttgctgatgaaattccggataaatcgtaattttgtcggcataatttcgatttaatttctccagcaggcgggtaatcttaatatagtgacgttgataattaaggtttttattcccttgtctatgcaaccgactcactgacgtattatgcagataatatttatataatgattgctcggtatatcgcgcacgcagcgcgttaaacataaattctgttgtccagacaatatcctgatgatgtaatccggcaataaatttaatgttatttttaacaataacatcgcggcgataaacccccatccagaccacgtgtgtccaacggcgggaagaaagtcccatccgcagccagtccggaccagttaatacaccggttgagcgaaggcgatcggtagggatggattgccaggtttcacccgtttcacgaaaacaccaatcagcgttgcactgcgccacgtcgaggtcgtcctctaacgccatggtcatcagcgtttcgtacatggtgggatagacctcatcgtcagcatcgacaaaagcgacatattttcccgttgccacttcaatcccacgattacgcgccaccgatgcgccagaattcgcctgatgcaacaaacgaacgtgcggatagttttctgcgtaatgctttgctatttcaacagaattatccgttgaaccatcgttaataataatgatttccagagcagtccatgtttgcgtaattaaagattccatacaagtgcggaaatcatcgcccgcattatataacggaataataacactaagtttattggtgctgttcatcataaattaccgacgacctctgaagttatcctgacgttttacaggctttgtattaagaaactattaagcctgtgagatattatttttaccggtgagagagtcacgtcagggtagagagataatgagagcagctatataagagatcagcgcaattacgatatcttgattacactgacaggattttacatatttaacggattatcctcaggcaaaagggctggaataccagcccttgttcgtgttaatcccagctcagaataactttcccggactggcccgaacgcatagcgtcaaagcccttctggaaatcatcgatagagaaacgatgggtaatgatcggcgagagatcgaggccagactgaatcagcgccgccatcttgtaccaggtttcaaacatctcacgaccgtaaatacctttaatgaacaagcctttaaagattactttggtccagtcgatagacatatcggacggtggaatacccagcatcgcaatacgaccgccgtggttcatggtgtcgagcatggtacgaaacgctggcggcgcaccggacatttccagaccgacatcaaagccttcggtcatgcccagttctgtcatcacatcattaaggttttctttagcgacgttaaccgcacgggtgatacccattttgcgtgccagctcaaggcggtattcgttaacatcagtgatcaccacattgcgtgcaccaacgtgtttcgccaccgccgcagccataatacctatcggacctgcaccagagaccagcacatcctcgccaaccagatcgaacgacagcgcggtatgcacagcgttaccgaagggatcaaaaatggaagccaggtcgtcggagatattgtccgggattttgaaggcgttgaacgccggaatcaccagatactcggcgaagcagcccggacggttaacaccgacgccgatcgtgttgcggcacagatgggtacgaccgccacgacagttgcgacagtgaccgcaggtgatatggccttcgccagaaacgcgatcgccaatcttgaagcctttcacttcctgaccaatacctaccacttcaccgacatattcatggcccacgaccatcggcaccgggatggttttttgcgaccactcatcccagttatagatgtgaacgtcagtcccgcagatggctgttttacggattttaatcagcagatcgttatgcccgagttccggtacaggaacgtcggtcatccagatgccctcttccgctttcagtttggataacgctttcatctcacaccctcaggcgataacgcccagttgtttaccaatacgcgtgaatgcttctactgcacgcgtaatttgctcaggggtatgcgccgcagacatctgggtacgaatacgcgcctgacctttaggaacgaccggatagaagaaaccggtgacgtaaatgccctctttttgcagctcacgggcaaatttctgcgccactaccgcatcgccaagcatgacgggaataatggcgtgatcggctcccgccagggtaaagcccgccgccgacatttgctcacggaactgacgcgcgttcgcccacagacggtcacgcagctcgctacccgcttcgaccatctccagcactttgatggatgcggcgacaatcgccggtgccagcgagttggagaacaggtacggacgagaacgctggcgcagccactcaaccacttctttgcgcgccgcggtataaccaccagaagccccgcccaatgctttacccaacgtaccggtaatgatgtctacacgccccatcacatcgcagtattcatgggaaccacgaccattttcaccgacaaaaccgaccgcgtgggagtcgtctaccatcaccagggcatcgtatttatctgccagatcgcaaacgcccttcaggttggcaatcacgccgtccatcgagaacacaccatcggtggcaatcagcacatgacgcgcaccggcttcacgcgcttctttcagacgtgcttccagctcctgcatatcgttgttggcataacgatagcgtttggctttacacagacgcacaccatcaataatagacgcgtggttcagtgcgtcggagataatggcgtcctccgcgctcagcagcgtttcaaacaggccaccgttagcatcaaagcaggaagagtagagaatcgcatcttccatccccaggaatgccgccagtttttgttcaagctctttatggctgtcctgggtaccgcaaataaaacgcaccgaagccatgccgaaaccgtgagaatccattcccgcctttgccgccgcaatcagatccggatgattcgccagtccgagatagttgttggcacaaaagttaatgacgtggcttccatcagccacagtgatatctgcttgctgcgcagacgtaataatgcgctcttctttaaacaacccttccgcccgtgcggtttccagatcgttggttaactgctgataaaattctccacgcattgcgattctccagacagggcaaattccagcacatattacccaaacttataggtcgcgacgagatgacgcgttaacacttctgcaaaattcaggataaataacgtccagccccctcacttttggtgaatggctgaagccaacgtcatgtagtgatatgatagaagtattcgtgtctgagattgtctctgactccataattcgaaggttacagttatgatcatcgttaccggcggcgcgggctttatcggaagcaacatcgttaaagccctgaatgataaaggcatcaccgatattctggtggtggacaacctgaaagacggcaccaagtttgtgaacctggtggatctggatatcgcggactatatggataaggaagacttcctgatccagattatggctggcgaagagttcggcgatgtcgaagcgattttccacgaaggcgcgtgctcttccaccaccgagtgggacggcaagtatatgatggataacaactatcaatactccaaagagctgctgcactactgtctggagcgcgaaatcccgttcctgtatgcctcttccgcagccacttacggtggacgcacctccgactttattgaatcccgcgaatatgaaaaaccgttgaatgtctacggttactcaaaattcctgtttgatgaatatgttcgccaaatcctgcctgaagcgaactcacagattgttggcttccgttatttcaacgtttatggaccgcgtgaaggccataaaggcagcatggcgagcgtcgctttccatctcaacacccagcttaataacggtgaatcaccgaagctgttcgaaggtagcgagaacttcaaacgtgacttcgtctatgtgggcgatgtggcagatgtaaacctgtggttcctggaaaatggcgtttccggcatcttcaacctcggcaccggtcgtgcggaatccttccaggcagtagcagatgctacgcttgcttatcacaagaaaggccagatcgaatacattccgttcccggataaactgaaaggccgctaccaggcgttcactcaggcagatctgacgaatctgcgcgcggcgggttacgataaaccgttcaaaaccgttgccgaaggcgtaacggaatacatggcctggctgaatcgtgacgcataagagctctgcatgaaaatactggtgatcggcccgtcttgggttggcgacatgatgatgtcgcaaagtctctatcgcacgctccaggcgcgctatccccaggcgataatcgacgtgatggcaccggcatggtgccgtccattattatcgcggatgccggaagttaacgaagcgatccctatgcctctcggtcacggagcgctggaaatcggcgaacgccgcaaactgggtcatagtctgcgtgaaaagcgctacgaccgcgcctacgtcttacctaactccttcaaatccgcattagtgcctttcttcgcaggtattcctcatcgcaccggctggcgcggcgagatgcgctacggtttactcaacgatgtacgcgtgctcgataaagaagcctggccgctaatggtggaacgctatatcgcgctggcctatgacaaaggcgttatgcgtaccgcacaagatctgccgcaaccattgttatggccgcagttgcaggtgagcgaaggtgaaaaatcatatacctgtaatcaattttcgctctcatcagaacgtccgatgattggtttttgcccgggtgcggagtttggtccggcaaaacgctggccacactaccactatgcggagctggcaaagcagctgattgatgaaggttatcaggtggttctgtttggctcggcgaaagatcatgaggcgggcaatgagattcttgccgctttgaatacagagcagcaggcatggtgtcggaatctggcgggagaaacacagcttgatcaagcggttatcctgattgcagcctgtaaagccattgttactaacgattctggtctgatgcacgttgcggcggcgctcaatcgtccgctggttgccctgtatggaccaagcagcccggacttcacaccaccgctatcccataaagcacgcgtgatccgcctgattaccggctatcacaaagtgcgtaaaggtgacgctgcggagggttatcaccagagcttgatcgacattactccccagcgcgtactggaagaactcaacgcgctattgttacaagaggaagcctgacggatgcgggttctgatcgttaaaacatcgtcgatgggcgatgttctccacacgctgcccgcactcactgatgcccagcaggcaatcccagggattaagtttgactgggtggtggaagaagggttcgcacagattccttcctggcacgctgccgttgagcgagttattcctgtggcaatacgtcgctggcgtaaagcctggttctcggctcccataaaagctgaacgcaaagcgtttcgtgaagcgctacaagcaaagaactatgacgcagttatcgacgcccaggggctggtaaaaagcgcggcgctggtgacgcgtctggcgcatggcgtaaagcatggaatggactggcaaaccgctcgcgaaccgttagccagcctgttttacaatcgtaaacatcatattgcaaaacagcagcacgccgtagaacgcacccgcgaactgtttgccaaaagtctgggctatagcaaaccacaaacccagggcgattatgctatcgcacagcatttcctgacgaacctgcctacagatgctggcgaatatgccgtatttcttcatgcaacaacccgagatgataaacactggccggaagaacactggcgagaattgattggtttactggctgattcaggaatacggattaaacttccgtggggcgcgccgcatgaggaagaacgggcgaaacgactggcggaaggatttgcttatgttgaagtattgccgaagatgagtctggaaggcgttgcccgcgtactggccggggctaaatttgtagtgtcggtggatacggggttaagccatttaacggcggcactggatagacccaatatcacggtttatggacctaccgatccgggattaattggtgggtatgggaagaatcagatggtttgtagggctccggggaatgagttgtctcaattgacagcaaatgctgttaagcaattcattgaagaaaacgctgaaaaagctgccatgatttaaattacaactctttaatagataattttgaaataaaatcagcttccttgctgattttatttcacatattcattacttatctaataaacattggtccgattgtactttaaaataagcacaaagcaatattatggtgacaaacacagcagtcggaaccggtttagaaaagagtattacatcacttaggcctactaccagtagtgaaaaaagcaagattaaaatataaggttctttagcagttcttaaggcatatatgaatattgctgaaaaggctaaaattgttaatgctactccaggaataccacgcgttgataacgtatctatgagatcgttatgcaaatgagaatctacaaagggtaaagcaccacttaatctaggctctttctcttctagttcatgtattttttccgcacgtttttccagtgattgtcctattggagaatatgtttttaaaccaacttcatacattgccagacgggcaccgactgaagttctggtgttatcatgcgaataattaactaaatccctatttaagtcattcattctcgtaagtaatgtatctttaaaagaaaatacacctgctaataatgcaatcgcaataaaacaatataacttataattaattcgcttattaatataactatccattacgattaatagtaacgcaaagaatggaaacactaatatggctgcacgcgtttcagttactataacagcacataagctaagcatgaagttaattgtatataatgttgttttatgtctaaagtcggattttaaaatgagaattgatgccagtaaagaagggaaaaggatgatgtagcctgctgttgtagcgtgggaagctgataatgcaacacggtcgacgtttaaatagaaatgttgccacatggcatgcgcaaaaaaaagtaactgcgttgccaaggatgcgaacagaattagtttcccaaattttattttggttctcatctcatctttagcaaaaagaactaagaaaataaaagcactacacaaggcaatttttccagtttccattgggccacgatatgcattggtataaaccgagcctgaaactttataatgtgaataccagatgatattaacgatacccaaaagacataatgagatgaaaattaacaaagtaggattattagttattgttttttttggtgtcgctagaaaatataatgcagatataattccagctgcatgaagaaactttgttgcaacatcatcccacaaagacaaagtcattaaagacaacatacataatatgagaattaaagacttgacaccagagttaatttcattccaacaaaacgacatataatttcaacctatgctacgaggatgggttatttaatgcaagacctaacgtttattcttttttctatttaccagtcttaccatcctccagagaatatagttttttgatgctaatatctttgctcgcctcttatctctcttgccaagaagattacaatctttcaattctttttcattgctttcaactaattgatttaataattcaaaatcgccattaagtagaacattccataaataacgagttttatgataagttctatttttactcaataatgtatgaatttcttctttccggttacctttgtataactgcatcacagaagagtagattctttcgtgcgcaaatgactcatgtcgataatgagtgatggttctacatgagttcattaaggaattttctctatagttatgcttatacatataatatggaaccgcatacatatcgcatgtaattagcagtcgatagataaaatccagatcttctcctagtcgtaaatcttcatcaaaaaaaagattattatcttccaggagttgttttcttataaacaagcatcctatatggaatctgacctttttataaaaaaaatcgaaaagtaaagacccttcattaaaatctgtatttataggtgagtaagtaacaccattttttatatgatggccataaagcccacaataaatcgcatcccctcccgtctcatgttgtctggaatacatcttcagcagatagttaggatctatctcatcatcatcatccataaaacatataaactgtccttgcgccttgcggatacctgtattcctggcagacgaaacaccgccattttctttattgataataattaatcgagagtgggttaacccatactctctcaaaacacttgatgtgttatctttagaaccatcattaacaataacaatttcaaaatttgggtaagtttgtttttctaatttcgttagagtttcagtaatgtaatcagatgaattatacgtcggtattattatggatactaaagggtaatcattgctcatcgtgttctcttgcctgaactaataaaatattatagtactcatccttaattattattgtaactcagacatccatgatttttattattgcccaaatagttttcttttatacttatttaatttgaatttaatgaagtaaataaaagcgttaaacgtatcaccatttttctttgcatgttggtatttcacttgatactgcttttcattcgtggctggaataaacgccacatcattccagcaagaaacctgataagcctcattaaaatacttctggcagggataattcgtccagtcgttccagggcttcgttacgccaacataatgaatcagcttagtatcatcggtaatggtctttttataatcttcatcgcttttattttttaactcatagtcaatgccataaaagcaatcataatcgccgctaataaaaatacaatgactaaagaacagaatatttaaaatatcctgatcaaggcatttatatttcgtgtgctgcgggtcacttgccagcatagcaatggctttattcataaaatcatttttcgcccatgcttcaagctgcagatatactacaccggcgttgaaataattccctggaagtccctctatagccagacgcttcgctggtttttcctgcataaaaggcacatctttaataacagccgcgaacttatcgccatcaaaattaatatcaagcaatccagctaatgagcctttacagatgacatcagcatcgatatataacagattttcaatagtttcactcagatactggaacgcaactaaacggaagaatgttgcataagaccactgtttcaggctggggaagatatcaataaaggcactggatactttataaattcttacttcaacgttagcatttttgctggtaaaagcattaacacgttgtagataatcttcatcaatgtagtcagtaaagagatgaaacttaaccgcaaggtccgggttatgcataacaactgattgcatagatactgccgcaccaaataaaaagttgcggtcaataccgtaagcgatatttaacacacgatcggtgttagcaatttccccagagacagcgacttcagtaatactctcagctaataaatccatgttggttccgttttgactgtgtggtttacgctttgccttttaattttttaataaatttgcgtagtttggttctgtagattactgaatagtagccataatcttttatttcgttggcaatacccaggtgacgttccatggccagacgatcacgggctttccgctctgccgtacagcttttaccggataggtcaattatcctgacaccatctttactaacgataaagttaccccggtgtgggtcgcccgatagcatatttaaggcatgcaatttttccattgaagccttaatttctgctttaacatcttctggaataatcggcatatcattgagctctacgccctcgacatactcgataagcatgataaaaacactggcatagttgaaaattttacgctcagccagaaaataaaaatcattaggaaaagtaagacctgcacttctgacacgatcggtttcaacgatcaaattctgatagtagtcaccttttacaaaagattttaaaaaacgttcattccttttcgttttcggggcaaagactttaaaaacatagcgaccatatttcgtatcaatcaacgatactttggtatcatcaatattacgtaatacttttactgttttaaaattataggccagtatttcatcaaagatttctttatatttattatcgttatctttgtaataaaatgagaagccgcgatagcgtatacttgtaatcataagagtaatttatttcttaagcttgtacttaattaatgaagttatacctttaatatactcaccatgggcaaacagatgcttatattgtttctgcatttctgcaacagtccgcgcctctttaagaggatatttcttccagggagattgttcacgcgcgatattaaagtatgatgcagacggatatccagcccagctatgccatggtttagttatccctgtatagtgaatcaatactgttttatcggtaatggtttgctgatactttcgatgactacgatcatgaagttcgtttttcagggtataaatagtatcaaaatccttcgcgaggtagatattattcatattaaatgcgatattcaacgcatcctgatctaaatatttaagagagccatatttagtttcccctcgtaaaagcgtgagtaaatacggtgtcaaatttgcttcatgccattttttaagattgacatagataacgcctgcattgaaataacgtccattcattccgggaatgttaagacgttttgcacatgccgcctgagtactatcattgtcaggaataaccgcagcaaactcatctttaaatataatttttgtgagaggtttcagacttcctttacaaacgacatcggcatccagatacagcagtgtggaaatactttcactcagatattcaaaggacaataccctgaagtatgtcgcgtacgaccaaaactgtgacgtcggcagatcagcaaagtattttgggtcaattaaatatacaataattgaggtattaaattgttttgctgtttcattaaatgactttaaataatcatcatccacataatcagtgaaaacatgaaagacaaaattaatatctgaattattaatcaaaacggaagaaattgaaacgccagcaccatacaaaaaattcttatcgataccgtaggaaacatttagctctgggacgttttcttttttattatctgctaaatacgaaaaccgttcttttataaattcattcatttaacttttctcaatgtcattttattatctttaaataaaaataataaatataattcattatcccgttaattggtttattttgtttaaaattatgcttagcgcaataacgagcataatttgagttcattggccgcattaacggttcatttttccagggcgatgcttctttgcctttgataaatggctgcgcgcttggataaccggcccagtaatgccagggttttgtcgggccgacataatgaattaatacggtttcatcattaattggacaaataaatgatttttttaattcataatttaaactaaattgcgtattgtatttagcatcaatgaatttaactttccctaacaggataagattaagtatatcttgatccatataggttaaacgggaaacgacggctttatcagcaagcatcgacatcgctttagcagaaacggactcctgcgcccacgctagtgtattaattaacaggacacctgaattaaagtaacccttttcaagttcattacactgcagactttgagctcgtaatgaccaccagttagcatcgcgttcagtaacaacagcagcaacgttattggcaagatccattgttatcagcggctttaagtttccctgacaggcgatatcagcatccaggtacaggatcttatcttgttgatcaataaagtaatctgcaattacaaaacggaaatacatggcaatagaccaatttttggtcgtcggtaatgccttaagccgttcacaattcaccagatggatctggatacaggtatgatagcttttcgctaattgggataaacgctggatatcggcttcagggatatcatcaataaaaacgtggaaaacaaaactcacgtcgttgttatgtaacaaaactgacgtgattgaaacaccacaaccaaaaagaaagttctgatcaatgccataagcaacatggaatgatgatgccactgacaccgctggcctttcatcgaagatgattgtcttattgatcatctcttgtggattaaaatagtgggcactcatatttctctccggaaattacaacgattttcgaatcgttctttccctgatttttgtggcttttgcttctgcttgcgacagcagcccttgttcctgcttgagaatgtctttaagcggggcagaaaaatacaccttcatgaaccgccagatatcccgttgagtcaggccaatattcatcgaagaaaaataaagtccaataagatctttatcgcgccaacgacgtggaacgcgcgtgcgaagctgcgcccggtgcaggtcaattactgaaatttttaactcctcttccttaccggaaaaaggcaagtgcagcaggaaatgacagatataacagtcacggtggttaatgcccgcagcatgcatatcgcgcaccatcgtcgcgacacgcttaataagcatacgctttacgcgaacatctggtgggttggtcgcccagtcagcacagtaatcttccagactgatggttggtgtcagatcttcggtaataataaacgaggttctggtcagcggattaatgcctttttcgccgaatgccaccccatacatagtatcaacgccgacatcccgcagtcgatgaatcgcattccattcgcggtctgcgcctaatactggcatccgcaatgagagtaaatttttgattatctctttcagggtcgtgccgcgatgccatttgagaaaatagcttttgcccgccatttcaaagcgcagagtgcggcgagtttccagttcacgaaatacctcaccctgcaaggttttaacttcctcaaaaggatctttaccgcgccataacgtggcaaacggctctttaagttcaaccatccagaccacccgttatgatgtccgccgctttctctggcagactgtataaatcttgtgtatcagcataatgtcgcgcattttccgcccaggcctggcgcaatgaagattgcgttaacgctttgcgtaaaatctcattcaatgtttcctggcggaatggctcagcaatagcctcgccgcaattggcgtcgacaatataatgcgcatagccacaaacggctgttgttagtaccggtaatcctgcagttatcgcttccagcagtacaattcccgcggcttcctggtaggcaggatgaagtaataaatccgccgccgccattaattccgagacatcgttgcgccccgagaagaagtgaacattactgcgcacgccgcgtttttctgccagcgcctcaaattttcgcggtttatcctgcccaacaacatatagtaatgtgttgtggcgcagcgaatccggtaacgaagcaagtgcttcaatggaacgatcgacacctttacgcgtgaagtctgaaccaacctgcaacaataaatattgttgttcggttattccattcttcttacggaagatttcacggctattggctggctgctggctatatttacgatcaggataaatccccggaggcagaatatgaaaacgctccgcttcagtctgataatgtttctggaaatcggcgatttgcttatctgtcagcatcagcagctgtgtcggcttgccctgttcgaaggttgcccgctcaaaggcggcataatggcgataacgtgacgtcaggcgatagaaaaagcctttctcctgcgctactttctcggcataacaaacatcagcggcataataaacgtccagccccggcattttattaaatccaacgactctatcgacggggtgttcacgtaaatgtttttgcacccaggcaaaatattccgcattgcgcccgtgattggtatgcgatttaaccggcactttgatcagttcaaatacatcagggcattcgccttcccacgactgggtataaacccgaacatgatgacctcgggcggcaactgtctgagcaatacgcataaaatcgcgctgcaaaccgccaaagggaaaatatttatataaacaaaaagcaacgatcataacgacgtacctgtcgtggaggagggaagtaatttatcgacagctgcaatgacatctgccgccggaataaccgaaagatacatctcatttcggtcacgctgatcgcgcgttggcatttcccggtaatctcccgcccagaattgaatcatgttatttgaccagggacgccagaaaatatggtctgtcgcaccaaacagcgatatcagcggcgtattaactgcagcggcaatatgcgccggtgcggaatcaacgccaataaacagctgcgcatgatcgattaacgcaccaagttccgggaaggtcacctttccggccagcgccgttactggtggcgtctggcatccctgcgcaatttcattgacgcaggccagatcgtctttatctgggccggacgtcagaacgacttcataaccacgagcatgtaaggcatcaatcacagcggaaaacttggcgttgtcccaacatttgaagatttgccgcgccgtaggttggataaccacataattttgtccaacaccagcgtgatcaagttcgcgacgcatacgtttccagcttgcaggcgggtaactcatggttgtctgcttcaccaacgattcaagtcccaatggcgtcagcacggataagttactttccaccacatttccaccctgcaacggcaccaaatgagtgaaactattacgccaaaaagcagactgccgatgatgataatcctgggaaattttcacacgggcatttaataagcgaaccagtatagcaaccatccattgatcggtaagattaacgataaggtcatacttattggcacgtaataccttgatgagataaaaaaagttggcaattttttctgaggcttttgcttttttattttttatgccgtagagcgcgttaatctctggattttcagacaggatcgggatggtgtcctgataaagcagcacatcgatttttgcgtcagggtaattttttttcagcgaactaatgacgggagtagttaataacatatccccatgaaaacgcatcttaatgagcaaaattcttcgaaatggcttatccacaagtaactctttttgttgagattatccgattaaggtgaagcagaaaaagcacgctaccgccccaggctcaacagctacctgaatactgataccgcactgatattgacgcgctagtgtatcacttctttcgcggcaatccgactcgaatgatttttaagcacattgttgattttcaataaagaaatcaatcaaataaaatcattagcaaccatattcttttactgttgctctgcgattccttcctgcacgtactgcagaaatcaatgaatcgcataaaaatacaaaaaaagtatagatgttcagcaagaattggcgggtaaattgctatttaagtcaaaaatgggaaaagtaatggtaaagccacagctaaatacatagaatccccagcacatccataagtcagctatttactatgctcgaattgctttacaccgcccttctctaccttattcagccgctgatctggatacggctctgggtgcgcggacgtaaggctccggcctatcgaaaacgctggggtgaacgttacggtttttaccgccatccgctaaaaccaggcggcattatgctgcactccgtctccgtcggtgaaactctggcggcgatcccgttggtgcgcgcactgcgtcatcgttatcctgatttaccgattaccgtaacaaccatgactccaaccggttcggagcgcgtacaatcggctttcgggaaggatgttcagcacgtttatctgccgtatgacctgcccgatgcactcaaccgtttcctgaataaagtcgaccctaaactggtgttgattatggaaaccgaactatggcctaacctgattgcggcgctacataaacgtaaaattccgctggtgatcgctaacgcgcgactctctgcccgctcggccgcaggttatgccaaactgggtaaattcgtccgtcgcttgctgcgtcgtattacgctgattgccgcccaaaatgaagaagatggtgctcgttttgtggcgttgggcgcaaaaaataatcaggtgaccgttaccggtagcctgaaattcgatatttctgtaacgccgcagttggctgctaaagccgtgacgctgcgccgccaatgggcaccacaccgcccggtatggattgccaccagcactcatgaaggcgaagagagtgtggtgatcgccgcacatcaggcattgttacagcaattcccgaatttattgctcatcctggtaccccgtcatccagaacgcttcccggatgcgattaaccttgtccgccaggctggactaagctatatcacacgatcttcaggggaagtcccctccaccagcacgcaggttgtggttggcgatacgatgggcgagttgatgttactgtacggcattgccgatctcgcctttgttggcggttcactggttgaacgtggtgggcataatccgctggaagcggccgcacacgctattccggtattgatggggccgcatacgtttaactttaaagacatttgcgcgcggctggagcaggcaagcgggctgattaccgttaccgatgccactacgcttgcaaaagaggtttcctctttactcaccgacgccgattaccgtagtttctatggccgtcatgccgttgaagtgctgtatcaaaaccagggcgcactacagcgtctgcttcaactgctggaaccttacctgccaccgaaaacgcattgaggttgttatgcaaaaacgggcgatttatccgggtactttcgatcccattaccaatggtcatatcgatatcgtgacgcgcgccacgcaaatgttcgatcacgttattctggcgattgccgccagccccagtaaaaaaccgatgtttaccctggaagagcgtgtggagctggcacagcaggcaaccgcgcatctggggaacgtggaagtggtcgggtttagtgatttgatggcgaacttcgcccgtaatcaacacgctacggtgctgattcgtggcctgcgtgcggtggcggattttgaatatgaaatgcagctggcgcatatgaatcgccacttaatgccggaactggaaagtgtgtttcttatgccgtcgaaagagtggtcgtttatctcttcatcgttggtgaaagaggtggcgcgccatcagggcgatgtcacccatttcctgccggagaatgtccatcaggcgctgatggcgaagttagcgtagcgtttatgccggatggtatgccatccggctcgcatcaattacttctggcactgccgacaataaaacgttgcccgctgcgcatgtttagtcgccacaatcggcgtaccgcacacccgacacggctcgccttttcgcccgtaaacctgcaattcctgcgcgaaatagcccggtttaccatcactttgcagaaaatctttcagagttgtaccaccctgctcaatcgaacgcagcaacaccgctttaatcacccgagctaacaattcacactctgccagcgacagtgatgacgccagccgatccggatggatccccgcagcaaacagagattcgctggcatagatattccctacgcctaccaccagcttgttatccatcagccatggtttaatcgccgtttttttcttctcgcacttctgatgcaggtactcaccgttgaaatcgtcgctaagcggctccggtccaagatgggccagcacgttgtgcccttccagctctttggtccacagccaggcaccaaagcggcgcggatcggtgtagcgcagcactttaccgttgctcatcaccaaatcaacatggtcatgcttttcagggggaagttcttctggaaggatgcgcaggctgccagacatccccaaatgaatgataatccagccctcaggcagctccagcagcagatatttagcccgccgctgcacgctaagcactggttggtcgcttaaacggtagatctcttctgaaaccggccagcgcaagcgtccgttgcgcaccaccgcatgaagaatggttgcaccaacgagatgcggttctatgccgcggcggctggtttcaacttcgggtaattcaggcatagcatctccaggaatgaacagatgcagtcaatatgggggcaggcagataacaaaaaaccccgccggggcgaggtttttcgttacatcaaagcaaaaattatttgattttcgcttctttgtagatcacgtgctggcgaacaactggatcgaattttttcagttccagtttttccggcttagtacgtttgttcttcgtagtggtatagaagtgaccagtaccagcagaagaaaccagcttgattttctcacgaatacctttagccatgatttatttcctctaagtacttagtacttttcgccacgggcacgcagttcagccagaactgtatcgatgccttttttatcgattacacgcatacctttagcagatacgcgcagggtgacaaaacgcttctcgctctcaacccagaaacggtgagagtgcaggttcggcaggaaacggcgtttagtcgcgttcagtgcgtgggaacggttgttaccggtcaccggacgcttgccagtaacttggcagactcgggacatgtctattctccaaaaatcaaattagctcgagcttcgtatggggtattggcgcctcgtcaggctttacagcccggtcatcgcagttctatgtgaactctcgattgccaggcccaaatgccaaacccgagattctcaaaggtggcgtagtatacgctgactcagcgatgtgctcaagtcccgaacagacaaagatcccgaaggatcgcgcatagcgggttaaatccagccgcgttcggcaaaagaaacatactctccacgcccaatcacgatatggtcgagcacgcgtaaatccatgaactgacaactctttattatccgttcagtaatgagtttatccgctttactgggttcagcacaacccgaagggtgattatgcgcaaggatcagcgccgaggcgtttatttttatcgcttcgcggataatttcccgaggatggacttcaacatggtttagcgtgccggaaaaaagacggctatgcgttataaccctgtgttgggagtcgagaaagatcaccataaagatctcccgctcctcgcccgtgagctggctttgtaaaaattccctcgtcatctccgggctgagtaaagggctttcttcacgcatccgtacgttgtagtaacgccgcgccagttcggcaatcccctttaactgggcgaatttcgccacgccaattccatgaacgccactaaattgctcatattcagaggttaacaagccataaagagagccgaaattctccagcatctcttttgccagggttaatacatctttaccgcgcgttccggtacgcagaaatagcgccagcagctcgacatccgttaaggcgctaataccaaacttcagcattttttcgcgcggcatcaacagctgtgcattgtttttcaccttcacctcctttgtggtgctcgcatcctgtcatagccgttcctttaaatcgacggccagttttcaatcctggaaagcgcctcgcaaagtgaatctcaggtgaaggcacgacaacaaaagtattgtgataaaatcgccaacttctggtgtcacccaacaggaaaaatcatcatgagcctggccggtaaaaaaatcgttctcggcgttagcggcggtattgctgcctataaaacccctgaactggtgcgtcgtttgcgcgatcgcggggccgatgtccgcgtagccatgaccgaagcggcaaaagcctttatcaccccacttagcttgcaggcggtttctggttatcccgtttccgacagtctgctggacccggcagccgaagccgctatgggccatattgagctgggtaaatgggctgatttagtgattctcgcccctgccacggcagatttaattgcccgtgttgctgccggaatggcgaatgacctggtatcgacgatttgtctggctacacctgcgcctgtagccgtgctccccgccatgaaccagcagatgtaccgtgccgccgccacgcagcataatttagaggtgcttgcctcacgtggtttgctcatctgggggccagacagcggcagtcaggcttgtggtgatatcggcccaggacgaatgctcgatccgttaactattgtggatatggcggtagcgcatttttcgcccgtcaacgacctgaaacatctgaacattatgattaccgccggtccgacgcgtgaaccgctcgatcccgtgcgttatatctctaatcacagctccggcaagatgggttttgctatcgccgccgcagcagcccgtcgtggcgcgaacgtcacgctggtatcaggtccggtttcgctaccgacgccaccgtttgttaaacgtgttgatgtaatgactgcgctggaaatggaagccgccgtgaatgcatctgtacagcagcaaaatatttttatcggttgcgccgccgtggcggattatcgcgcagctaccgtggccccagaaaaaatcaaaaagcaggccacgcagggtgatgaattaacaataaaaatggttaaaaaccccgatatcgtcgcaggcgttgccgcactaaaagaccatcgaccctacgtcgttggatttgccgccgaaacaaataatgtggaagaatacgcccggcaaaaacgtatccgtaaaaaccttgatctgatctgcgcgaacgatgtttcccagccaactcaaggatttaacagcgacaacaacgcattacaccttttctggcaggacggagataaagtcttaccgcttgagcgcaaagagctccttggccaattattactcgacgagatcgtgacccgttatgatgaaaaaaatcgacgttaagattctggacccgcgcgttgggaaggaatttccgctcccgacttatgccacctctggctctgccggacttgacctgcgtgcctgtctcgacgacgccgtagaactggctccgggtgacactacgctggttccgaccgggctggcgattcatattgccgatccttcactggcggcaatgatgctaccgcgctccggattgggacataagcacggtatcgtgcttggtaacctggtaggattgatcgattctgactatcagggccagttgatgatttccgtgtggaaccgtggtcaggacagcttcaccattcaacctggcgaacgcatcgcccagatgatttttgttccggtagtacaggctgaatttaatctggtggaagatttcgacgccaccgaccgcggtgaaggcggctttggtcactctggtcgtcagtaacacatacgcatccgaataacgtcataacatagccgcaaacatttcgtttgcggtcatagcgtgggtgccgcctggcaagtgcttattttcaggggtattttgtaacatggcagaaaaacaaactgcgaaaaggaaccgtcgcgaggaaatacttcagtctctggcgctgatgctggaatccagcgatggaagccaacgtatcacgacggcaaaactggccgcctctgtcggcgtttccgaagcggcactgtatcgccacttccccagtaagacccgcatgttcgatagcctgattgagtttatcgaagatagcctgattactcgcatcaatctgattctgaaagatgagaaggacaccacagcgcgcctgcgtctgatcgtgttgttgctcctcggttttggtgagcgtaatcctggcctgactcgcatcctcactggtcatgcgctaatgttcgaacaggatcgtctgcaagggcgcatcaaccagctgttcgagcgtattgaagcgcagttgcgtcaggtattgcgtgaaaagagaatgcgtgagggtgaaggttacaccaccgatgaaaccctgctggcaagccagttgctggcattttgtgaaggtatgctgtcacgatttgtccgcagcgagtttaaataccgcccgacggatgattttgacgcccgctggccgctaattgccgcacagttgcagtaagatgacgccggatgacttttcatccggcgagtttcgttaaacgccaaactcttcgcgataggccttaaccgccgccagatgttccgccatttctggcttctcttccaggtaagcaatcaggtctttcagggtgatgatagagatcaccttgcagttgtaatcacgctcaacttcctgaatcgccgaaatttcgccgcgcccgcgttcctgacgatcaagcgaaatcaacacgcctgcaagcgtcgcgccattggcctgaataatttccatcgactcgcgaatcgccgttccggcggtgatcacatcatctaccagcattacgcgtccttgtaacgcgctaccaaccagattaccgccttcaccgtggtcttttgcctctttgcggttaaagcagtacggcaggtcaaggtcatgatgctccgccagcgccacggcggtagtggtggcaatcgggatccctttgtaagcagggccaaacagcagatcgaactcaatgccggaatccaccaatgcttcagcgtaaaaacggcctaacagtgccagatcgcgcccggtattaaacagcccggcgttgaagaaataggggcttttgcgcccggatttcagcgtgaactcgccaaactttaacacctgcttgctaagcgcaaattcaataaactggcgctgatatggtttcatgccttcgctcctcatcttacttttctacagacaaaaaaaaggcgactcatcagtcgccttaaaaatcagtttgccagcgccgccttctgcgtcgctacaatggattcgattccccctcgggccagcgccaacaaggtgagtaactcttcgtgggtgaacggttcgccttctgccgtcccctgcacttcaatgatacgcccgtcttcggtcatcactacgttcatgtcggtctctgcggcagagtcttcaacatattccagatcgcaaaccgcttcaccgttcacaatcccgacagagaccgcggctaccatccctttcattggattagttttcagcttgccgttttccaccagcttctgtagcgcatctgccagcgccacgcaggcacccgtaatcgaagcggtacgcgtgccaccatcagcctgaagcacgtcgcagtccagcgtaatggtgaactcacccagtgctttcaaatctactgccgcgcgaagagcacgggcgatcagacgctggatttccattgtgcgtccaccctgcttacctttcgccgcttcacgcgcgttacgggtatgggtagaacgtggcagcataccgtactctgcggtgatccagccctggccctgacctttcaggaagcgcggcacgccttcttcaatagaggcggtacacaatactttggtatcgccaaattcgaccagcaccgagccttctgcatgttttgtatagttacgagtcagggtaacgggacgcacctgattattgctacggcctgctggacgcatattgaaatctccggcttgaaacaaatgtggctgcgcattatacggacttccggcggttattcctatcctgacaaggcatcgatggctataatccttccacctctccttttataaacaggaacgtctatgatccgcagtatgaccgcctacgcccggcgtgaaatcaagggtgaatgggggagcgcaacctgggaaatgcgctcggtaaaccagcgttatctggaaacttactttcgtctgccggagcagttccgtagccttgaacctgtcgttcgcgagcgtattcgttctcgcctgacgcgcggtaaagtggaatgtactctgcgctatgagccagatgttagcgcgcaaggtgagctgatcctcaacgaaaaactggctaaacagctggtaactgccgcgaactgggtaaaaatgcagagcgacgaaggagaaatcaacccggttgatattctacgctggccgggcgtgatggcagcccaggagcaagatctcgacgcgattgcagctgaaattctcgcggcgttggatggcaccctggatgactttatcatcgcgcgcgaaaccgaaggtcaggcactgaaagtgttgattgagcagcgtctggaaggcgtcaccgccgaagtggccaaagtccgcgcccatatgccggaaatcctgcaatggcagcgtgagcgtctgatagcgaagctggaagatgctcaggtgcaactggaaaacaaccgtctggagcaggagttggttctgctggcacaacgaattgacgttgccgaagaactggaccgcctcgaagcgcatgtcaaagagacctacaacattctgaagaaaaaagaagccgttggtcgtcgtctggactttatgatgcaggagttcaaccgcgagtcgaacactcttgcttcgaaatctatcaatgccgaagtgacgaattctgccatcgagctgaaagtgttgattgagcagatgcgcgagcagatccagaacattgaataactcgtaacgccaattcttccttttcagccttcacaaatgccgcccactcaaacagagcggcatttttcctccccgcaacattcaattctgttttgcgtgcctgctccagattttgcgatgtttttttgcccagcgcagtgagaacgtgagatactcacaactgtatataaacacagttgtaaacttactttccttgcaatcgatatcatatggagtgggcaatgaacgaacatcatcaaccttttgaagaaatacggcattatggcactgaagggcaagaattttggtcagcgagagaattggcaccgttactggattatcgggactggcgcaattttcaaaaggtactggcccgcgcgactcaagcgtgcgaagccagcaatcaagccgcatctgaccatttcgttgaaaccaccaaaatggttgtattaggttcaggggctcaacgagaacttgaagatgttcatctctcccgctatgcctgttacctggtagtacaaaacggcgaccctgcgaaaccggttattgcggcagggcaaacttattttgctatccagacccgacggcaggagctggctgacgatgaagctttcaggcaacttcgtgaagacgaaaagcgtctttttctgagaaatgagttgaaagaacataacaaacaattagttgaggcagcgcagcaagctggggtagcgacagctatcgatttcgccatatttcagaatcatggttaccggggactgtatggtggattagatcagaaagccatccatcagcggaaggggctgaaaaagagtcagaagatcctggatcatatgggttcaacagaactggcggctaatctctttcgagctacccaaacagaagaaaaactcaagcgggatggcgtgaattcaaaacagcaagctaataccacacactttgacgtgggtcgcaaggtgaggcaaaccattcaggaacttggcggaaccatgcctgaggagttgccgaccccgcaggtcagcatcaagcagttggaaaacagtgtaaaaattacagagaagaaatagcagaaaataaaaactctttttgttgattgagatacccgatgcgtaagccaaagtccaggtgcggtgaacacaatggctaaacattgcacctttcttttccacccctcaattttaacctattttttcttatgcattttctcagacaagaagtcagaagaatgcatctacgctacagaaaatagcgatttcacataactacaagttatcaatttcctctcaccttaaaaaatctcaatcgtgacaatacgcacaaatcgctaccctgccagacagatttttagggagagaaccatgctgttacacattttgtatttggttggcattactgccgaagccatgacgggggcgctggcggccggacgacggcgcatggatacatttggcgtaattattattgcgaccgccacggcaattggcggagggtcagtgcgcgatattctgctgggccactatccgctcggctgggtcaaacacccggaatatgtgattatcgtcgctaccgctgcagtactcaccactatagttgctcctgtaatgccttatctgcgcaaagtgtttctggtgctcgatgcgctcggactggtggtcttttctatcatcggcgcacaggttgcactggatatgggacacggcccaattattgccgttgtcgcggcggtaaccaccggcgtgtttggcggcgttttgcgcgatatgttctgtaaacgcatcccactggtattccagaaagagttgtatgcgggtgtctcatttgcctccgccgtgctgtacatcgcgctgcaacactatgtttctaaccatgatgttgtgattatctccaccctggtattcggcttttttgcccgtttactggcgctacgtcttaagctgggattaccggtcttttactacagccacgaaggtcactaaggttcaaaacctgtgatctgctgggcagacagccaactgcccagcttcttgatttgcgcattttccttccattcaataacctgtctggcgcgccccgatccagtccccggcagctgctgccagaactgttccgtgctaaataaaagttgcgaccaggaccgttcatcactggcattaagcgccgcccgggttagcggtattcccattgccatcacccagcgagtaaaaggctgctgacgagccagattaaactgatgccataactgcgcacttttacttttcgcgatccccggcgtgttctgtaattgctctggcgttaataaaagccaggaaaagatatgctcaaagcgatgagtctgatgcagggcgcgccagccggcctcaccaatgccatcaagccccagaacctgttttgaccccagccagactaagcgtgaaatgaactgttcctgacaaacatcagaagcaaagtagcaggtcaacgagttaaagcggttttctggtggtgtcggttttgtacgttctgctccgcgccagaccacatcatcaatgcgaggaatcccctgaccggcaaggctgacgaggatctgatcaccaggcgcaatatcccattcctgccagcgcctgacggaaccaatattcacccgctggatttttttatcatccagcatgacaggtgcgagtgacgccaccaccgatattttaccgctcttacccaccgcaaattgaatcgccttcacttcggcaacctgagctacaggttgatatttccaggccaccagccactccgcctggcccggtaaccaatgacgggattcgggttctttcgccgctcgcacaaccacgccatcggtgacgaagggtaattttgctttccaccactcattgcgtacgtgcgcaacctcatcagcatttttaaccgcgcgggtatacgtctgcgttaaagtaaaacctgcggtagccagatcctttaaacgatcggtcattaaatgcggtccatccggccatgcccagacaaaaacagccagtgagtttagcgtatcgctattcccctggcgcatcatcaggccagcaacttttgcgcgggcatttattccccccatttgttgttggatatgccccttacgcttgagaaatatttccccctgaagcgtgctgttggctaaaggcccgctaacggtttgcggcacagcggaaattaagcgaactttctgcgtccagtcctcgcctttcaggccattaccgcgactgattgctttgttcagtttcccgtcccgataaaccagggttaccgcaacgccatcaacttttggctgcacccaaagatcgctacgttcgcgcatccacagacttaatgcgtttttatccgccattttgcgtacacccgtatgggcaaccggatgcataaccgcaccgtttaaaggcggcatcatcacatcgcgagtctcgttcccaaaacagcgttgccactgcgtgagacgggcgcttaactgatcgtaaacaccgtcttccacctcacttttcccttccttccagtagtcatcgtcccactgttttatttgctgttgcaggcgggaaatttcttcctgtgctctggctggcgaccaggccggacagaccgcccacgccgatgattgccagcacaagatacttattaatatcgccatccatactttcatcatcacctccgctgtagatagtcaggcagatatacaacttggtgaagacaaagccgagtggcaaaaacggagtctgcgaggacgcttcctgagaatcgtctttattgcagtgaatcacaggcaaatgcggaagcagctacgcaaaatgcaacaactttgcgcaaaaagtgtgagcaagggctacgtcacatggccgcgccgtgtataataagctcgtatgtaggctttatttcgctaatcacatacgaaagatactcatggctcaaggcacgctttatattgtttctgcccccagtggcgcgggtaaatccagcctgattcaggctttattaaaaacccaaccgttgtatgacacccaggtttctgtttcacacaccacacgccaaccgcgtcctggtgaagtccacggtgaacattatttctttgttaatcatgatgaatttaaagaaatgattagtagagatgcgttcctcgaacacgcagaagtttttggtaattactatggcacttcgcgtgaggccattgagcaagtactggcgaccggtgtcgatgtttttctcgatatcgactggcagggtgcgcagcaaattcgccagaagatgccgcacgcgcggagtatctttattttaccgccgtctaaaatcgaactggaccgccgtctacgcggtcgcggtcaggacagcgaagaggtcattgcaaagcgtatggcgcaagctgttgcagaaatgagccattacgccgaatatgattacctgattgtgaatgatgacttcgataccgcgttgaccgatttgaagaccattattcgcgccgaacgtctgcgcatgagccgccaaaagcagcgtcatgacgctttaatcagcaaattgttggcagactgaacctgatttcagtatcatgcccagtcatttcttcacctgtggagctttttaagtatggcacgcgtaactgttcaggacgctgtagagaaaattggtaaccgttttgacctggtactggtcgccgcgcgtcgcgctcgtcagatgcaggtaggcggaaaggatccgctggtaccggaagaaaacgataaaaccactgtaatcgcgctgcgcgaaatcgaagaaggtctgatcaacaaccagatcctcgacgttcgcgaacgccaggaacagcaagagcaggaagccgctgaattacaagccgttaccgctattgctgaaggtcgtcgttaatcacaaagcgggtcgcccttgtatctgtttgaaagcctgaatcagctgattcaaaactacctgccggaagaccaaatcaagcgtctgcggcaggcgtatctcgttgcacgtgatgctcacgaggggcaaacacgttcaagcggtgaaccctatatcacgcatccggtggcggttgcctgcattctggccgagatgaaactcgactatgaaacgctgatggcggcgctgctgcatgatgtgattgaagatacacccgccacctaccaggacatggaacagctttttggtaaaagcgtcgccgagctggtagagggggtgtcgaaacttgataaactcaagttccgcgataagaaagaggcgcaggccgaaaactttcgcaagatgattatggcgatggtgcaggatatccgcgtcattctcatcaaacttgccgaccgtacccacaacatgcgcacgctgggctcacttcgcccggacaaacgtcgccgcatcgcccgtgaaactctcgaaatatacagcccgctggcgcaccgtttaggtatccaccacattaaaaccgaactcgaggagctgggttttgaggcgctgtatcccaaccgttatcgcgtaatcaaagaagtggtgaaagccgcgcgcggcaaccgtaaagagatgatccagaagattctttctgaaatcgaagggcgtttgcaggaagcgggaataccgtgccgcgtcagtggtcgcgaaaaacatctttattcgatttactgcaaaatggtgctcaaagagcagcgttttcactcaatcatggacatctacgctttccgcgtgatcgtcaatgattctgacacctgttatcgcgtgctgggccagatgcacagcctgtacaagccgcgtccgggccgcgtgaaagactatatcgccattccaaaagcgaacggctatcagtctttgcacacctcgatgattggcccgcacggcgtgccggttgaggtccagatccgtaccgaagatatggatcagatggcggagatgggtgttgccgcgcactgggcttataaagagcacggcgaaaccagcactaccgcgcaaatacgcgcccagcgctggatgcaaagcctgctggagctgcaacagagtgccggtagctcgtttgaatttatcgagagcgttaaatccgatctcttcccggatgagatttacgttttcacaccggaagggcgcattgtcgaactgcctgccggtgcaacgcccgtcgacttcgcttatgcggtgcataccgatatcggccatgcctgcgtgggcgcacgcgtcgaccgccagccttacccgctgtcgcagccgcttactagcggtcaaaccgttgaaatcattaccgcaccgggtgctcgcccgaatgccgcgtggctgaactttgtcgtcagctcgaaagcgcgcgccaaaattcgtcagttgctgaaaaacctcaagcgtgatgattctgtaagcctgggccgtcgtctgctcaaccatgcgttgggtggtagccgtaagctcaatgaaatcccgcaggaaaatattcagcgcgagctggaccgcatgaagctggcaacgcttgacgatctgctggcagaaatcggccttggtaacgcaatgagcgtggtggtcgcgaaaaatctgcaacatggggacgcctccattccaccggcaacccaaagtcacggacatctgcccattaaaggtgccgatggcgtgctgatcacctttgcgaaatgctgccgcccaattcctggcgacccgattatcgcccacgtcagccccggtaaaggtctggtgatccaccatgaatcctgccgtaacatccgtggctaccagaaagagccagagaagtttatggctgttgaatgggataaagagacggcgcaggaattcatcaccgaaatcaaggtggagatgttcaatcatcagggcgcgctggcaaacctgacggcggcaattaacaccacgacctcgaatattcaaagtttgaatacggaagagaaagatggtcgcgtctatagcgcctttattcgtctgaccgcccgtgaccgtgtgcatctggcgaatatcatgcgcaaaatccgcgtgatgccagacgtgattaaagtcacccgaaaccgaaattaatgttttatgaacccaacacgttatgcacgcatctgcgaaatgctcgccaggcggcagcctgatctgaccgtctgcatggagcaggtccacaaacctcataacgtttctgcgattattcgtaccgcagatgccgttggcgtacatgaagttcatgctgtctggcctggcagccggatgcgcaccatggcttcggcagctgcgggtagtaacagctgggtacaggtgaaaacgcaccgcaccattggcgatgccgtcgctcatctgaaaggccagggcatgcagattctggcaacccatctttctgataacgctgttgatttccgcgaaattgattacactcgcccgacctgtattttgatgggacaggagaaaacgggcatcacgcaggaagcgttggccctggcggatcaggatatcatcattccgatgatcggcatggtgcagtcgctgaatgtttccgttgcctcagccctcattctttacgaagcccagcgccagcggcaaaatgcgggcatgtacctgcgtgaaaacagcatgttgccggaagccgagcaacaacgcctgctgtttgaaggcggctatccggtgctggcgaaagtcgcaaaacgcaaaggtctgccctacccccacgttaatcagcaaggcgagattgaagccgatgctgactggtggtccaccatgcaggccgcagggtaagcgcgatgaaaggtcgcctgttagatgctgtcccgctcagttccctaacgggcgttggcgcagcgcttagtaacaagctggcgaaaatcaacctgcataccgtacaggatttgctcttacaccttcctctgcgctacgaagatcgcacacatctctaccccatcggtgaactactgccgggtgtttatgccacggtggaaggcgaagtgctgaactgcaatatctccttcggcggtcggcggatgatgacctgccagatcagcgacggttccggcattctcactatgcgctttttcaacttcaatgcggcaatgaaaaatagcctggcgacaggccgccgcgtgctggcctatggcgaagcaaagcgcggcaaatatggtgcggagatgatccacccggaataccgcgtacagggcgatctcagcacgccagagttacaggaaacgctcacgccggtttacccaactacggaaggcgtaaagcaggctacgctgcgtaaattaaccgaccaggcgctggatctgctcgacacatgcgccattgaagaactcctgccgccggaactgtcacaaggaatgatgacgctaccggaagcgttgcgcactttgcaccgcccgccgccgacgctacagcttagcgatctcgaaaccgggcagcatccggcacaacgccggctgattctggaagagttgctggcgcacaacctcagcatgttggcgttacgtgccggtgcacaacgttttcatgctcagccgctgagcgccaatgacgcgctgaaaaataaactcctcgccgccttaccgttcaagccaacgggcgcacaggcacgcgtagtggcggagatcgagcgcgatatggcgctggatgtgccgatgatgcgtctggtgcagggcgatgtaggttccggtaaaacgctggtcgccgccctcgccgcgttgcgtgcgattgcgcacggcaaacaggtggcattgatggcaccaaccgaattactcgccgagcagcacgccaataacttccgtaactggtttgctccgctcggtatcgaagtgggctggctcgccggtaaacagaaaggtaaagcacgactggctcagcaagaagccatcgccagcggtcaggtgcagatgattgttggtacgcacgccattttccaggaacaggtgcagtttaacggcctggcgctggtgattatcgacgaacagcatcgttttggcgtgcatcagcgtctggcgttatgggagaaaggccagcagcaaggcttccatccgcatcagttgatcatgaccgccacgcccatcccccgcacgctggcgatgactgcgtatgccgatctcgatacctcggtgatagatgagctgccgccaggccgcacgccagtgactacggtcgctattcctgatacccgccgtaccgacattattgaccgcgtgcgccacgcctgcataactgaaggtcgtcaggcatactgggtttgtacgttgattgaagagtcggaattgctggaagcgcaggcggcggaagcaacctgggaagagttgaaactggcgttgccggaactgaacgtcggcctggtacacgggcggatgaaacctgccgataaacaggcggtgatggcgtcgtttaaacaaggtgaactacacctgctggttgccactaccgttattgaagtcggtgttgatgtgcctaacgccagtctgatgattatcgaaaacccggagcgtctgggtctggcgcagttacaccagcttcgcgggcgtgtaggtcgtggtgcggtggcttctcactgcgtgctgctctacaaaacgccgctctccaaaaccgcgcaaattcggctgcaagtgctgcgcgacagcaacgacggttttgtgattgcacagaaagacttagagattcgcggaccgggtgaactgttaggtacgcgtcagacgggtaatgctgaatttaaagtggcggatttactgcgcgatcaggcgatgatcccggaagttcagcgcctggcgcgacatattcacgaacgttacccacaacaggcaaaagccctgatagaacgctggatgccagaaacagaacgctactcgaatgcgtaaaaggcggcggtgagaagaccgccgcttcatcggttaacccgtaaaaatcggcaacatcaaatacagcttaatcaccagcgcattgacgatatcgataaagaacgcaccgaccatcggcacgaccaggaacgccatgtgcgacgggccaaagcgttcagtgatcgcctgcatgttggcgattgctgttggcgttgcaccgaggccaaaaccacagtgacccgcagccagcactgccgcatcgtagtttttgcccatcatgcgccaggtaacgaagatggcatacaacgccatgaagatggtctgtaccaccagaatcgccagcatcggcaacgccagcgaagccagctcccacagtttcagccccatcagcgccatcgccaggaacaacgacaggcttacgttacccagcacggataccgcacgctcaaagacgcggtaaaagcccatcattgacagaccgttgctcagaatcacgccaacaaatagtacacagacgaaggtcggtagttcaaaagcagtaccagccaaaagttgcgcaacaattttccccactgtcaggcagatagcaatcagcgcgatagtttcaatcagcaccagcgaggtgatcatgcggcccacatccggcttttcgaacgcagtcggaacttcctggtcatccggaataccgttcggtgtggtggagtgtttcaccagatagcgcgccaccggaccgccaatcaagccgcccagcaccaaaccgaacgttgcacaggccatcgccacttctgtcgcgttggtgaagccataacgttcaatgaacaatttactccatgcagcacccgtaccgtgaccgccggaaagcgtaatagaaccggccagcagccccatcagcggatcaagccctaacaggctagccataccaatgccaatggcattttgcatcaccaacaggccaacaaccacaatcaggaaaacccccaccacacgcccaccagctcgcagactggcaaggttggcgttcaggccaatggtggcgaagaaagccagcatcaacggatcccgcagggacatatcaaagttgacttcccagcccatgctttttttcagtatcagcagcgccagcgccactaataaaccacccgcaacaggttccggtatggtgtattttttcaaaaaggagacggaatggaccaacttgcgcccgagcagcaacgtcagcgttgcggcaacaagcgttgctaaagtatcgagatgaaacatagttactcctttgtgtccgcatcactctttcatactcgtcatacttcatcgcgcatttgcagtaaggcgaaatatgacgagtatcgagtcatgctttcctggttcgaattcttagctgaaactagaaaaatggcatggattttaagcagaaaacaactaaaagttatataaaaaagtacatttatctcatttaaatatttagatgaggatgtggcaaacgtttgcttttctctttcggtcagctaaaatgcccgctttgctaccacgggattgttttcgatgtctgtttccaccctcgagtcagaaaatgcgcaaccggttgcacagactcaaaacagcgaactgatttaccgtcttgaagatcgtccgccgcttcctcaaaccctgtttgccgcctgtcagcatttgctggcgatgttcgttgcggtgatcacgccagcgctattaatctgtcaggcgctgggtttaccggcacaagacacgcaacacattattagtatgtcgctgtttgcctccggtgtggcatcgattattcaaattaaggcctggggtccggttggctccgggttgttgtctattcagggcaccagcttcaactttgttgctccgctgattatgggcggcacagcgctgaagaccggtggtgctgatgttcctaccatgatggcagctttgttcggcacgttgatgctggcaagttgtaccgagatggtgatctcccgcgttctgcatctggcgcgccgcattattacgccgctggtttctggcgttgtggtgatgattatcggcctgtcgctaattcaggttgggctgacctccattggcggcggttacgcagccatgagcgataacaccttcggcgcaccgaaaaatctgctgctggcaggcgtggtcttagccttaattatcctgcttaaccgtcaacgtaacccttacttacgcgtggcctcactggtgattgcgatggcggccggatatgcgctggcgtggtttatgggcatgttgccagaaagcaacgaaccgatgacacaagaactgattatggtgccaacgccgctctattacggtcttggcattgaatggagtctgctgctgccgctgatgctggtctttatgatcacttcgctggaaaccattggcgatatcacggcgacctctgacgtttccgaacagccggtttccggtccgctgtacatgaaacgcctgaaaggcggcgtgctggcaaacggcctgaactcgtttgtctcggcggtatttaataccttcccgaactcctgcttcgggcagaacaacggggtgatccagttaaccggtgttgccagccgctatgtcggttttgtcgtcgcgctgatgttgatcgtgctgggtctgttcccggcagtgagcggttttgtacaacacattccagaaccggttctgggcggcgcaacgcttgtaatgtttggcaccatcgccgcctccggtgtgcgtatcgtttctcgtgagccgctgaaccgccgggcgattctgattatcgcgctgtcgctggcggtcggtctgggcgtgtctcagcagccgctgattttgcagtttgcccctgaatggctgaaaaacctgctctcctccgggattgccgcgggcggtattactgccatcgtgctgaatctgattttccccccagaaaaacagtaattcactggcggcggtaagataattaccgccgcagtctcacctctttcaccattcccgccttgaggattgcgcgtaaatcgtgcataactcccttatgtgcatttcacgggatggaagaccatgaaatttattgggaagctgcttctctacattctcatcgctctgttagtggtgatcgctggcctctattttcttctgcaaacccgctggggagcagaacatatcagcgcatgggtttccgagaatagcgactatcatctggccttcggggcgatggatcaccgtttttccgcgccatctcatatcgtgctggagaacgtcacgtttggccgtgatggccagcccgcgaccctggtggcaaaaagtgtcgacattgcgctaagcagtcggcaactgaccgaaccacgccatgtcgataccatcctgctggaaaacgggacgctgaatctcaccgaccagaccgcgccgctaccgttcaaagccgatcgtctgcaactgcgtgatatggcgtttaatagcccgaatagcgaatggaaactgagcgcgcagcgggtaaatggcggcgtggttccgtggtcaccagaagccggtaaagtgctgggtacgaaggcgcagattcagtttagtgccggatcgctttcgctcaatgatgttcctgccaccaatgtactgattgaaggcagtattgataacgatcgcgttacgctgactaacctgggtgccgacatcgcccgcgggacattaaccggaaacgcgcagcgtaacgctgacggcagctggcaagtggaaaacctgcgcatggcggatatccgtctacaaagcgaaaaatcgctaaccgatttctttgcgccattacgctctgtcccgtcgttgcagattggtcgcctggaagtcatcgatgctcgtttgcaaggtccggactgggcggtgaccgacctcgatctcagcttgcgcaacatgaccttcagtaaagatgactggcagacacaggaaggcaaactgtcgatgaacgccagcgagtttattcatggctcgctgcatttatttgatccgattataaacgcagaattttccccgcagggcgtagcactgcgccagttcaccagccgctgggaagggggtatggtcagaacgtcaggaaactggcaacgcgacgggaaaacgctgatcctcgatgatgcggcaattgccggactggaatataccttgccaaaaaactggcaacagttgtggatggaaacgacacccggttggttaaacagcctgcaactgaagagatttagcgccagccgcaatctgatcattgatatcgaccctgacttcccgtggcagctcaccgcgctcgatggttacggtgccaatctgacgctggttaccgatcataaatggggcgtctggagtggctcggcgaatctgaatgccgccgccgcaacgtttaatcgtgttgatgtccgtcgtccgtcgctggcgctaactgccaacagcagcacggtgaatatcagcgaactgagtgcatttacagaaaaaggcattctggaagccaccgccagtgtttcacaaacgccacaacgtcagacccatatcagcctgaatggacgcggtgtgccggtgaatattttgcaacattggggatggcctgaattaccgttgactggcgacggcaatattcagcttaccgccagtggcgatattcaggccaatgtcccgctgaaacctacggttagcgggcaattgcatgccgtgaatgccgcaaagcagcaagtgactcaaaccatgaatgcgggcgtagtttccagtggtgaagttacgtcgacggagccggtgcagtaaaaataaggacgctagcggatatcagcgctagcgttccccgttattagcgcaaaattccatactcactgcacaataaccatttcaccggttcatcttcttctatcgccggaaaacgtcctcccggctcaagaaaataattatcgtgttggtcatcatttaccatcgagatttcccagccgagaacaaacgctttttccgcccagaagcgatgatacagacgcggcggcaggcaaatgccctgccccggctttagcaccagcgtttcaccaggtttcatggtacgccgctgaccatcaacactcacggtaatgactcgttgatcatcacagagattggcttcgttggcccaggccaactgcatgcataagtctccaccgccccgattgaggatatcttccattttgtgggtgtgaaaatgccagggagtctgctgatcttgttggatctgcaacattttctcagcatacggttttggatatgccgccgaccccagcgcgccgttgcgcatcgttagcagtgttagtcccgtttggttgaaatcaccacgaccaaaatcggtgatatcccaaccgagctgtaagtcgaccacttcttgccagttatcccgttcccgctgcagccagtcatccaccgtaaaataggcgaactctggcaaacaaacgcggaaggtctgcgcaatggcatgtgctttatcaataacataattaatttgtgaacgtttcattggcttctccgttgcgcatagcaagccaggcagcgccacgcattccgctactgtcgccgtgctgtgcttttacaatgggagtggtgaattgatcggtgaaaaccagtggagcgacttctgcgttcagatcggtgataagcagttccacattcgaaagcccgccgccgatcacaatcacgccagggtcaacaacattaacgatggttgccagcgtgcgggcaagctgttggcgaaaacgtgccacctgctgcatggcacaagcatcaccacgttgtgccagggtgacaatcgccgcagaagtgagcaagttaccagtcatctgttgatagcgttcactaaaaccgctgccggaaacaaacgactccacgcagttgtgtttgccgcaatagcaactgactgatggaccatcttcctgctccgtatagcctggcaacgtgatatgaccgcattcggcagcatttccccaggcccctataaacggtcgttgcttgatggcaatgccaccgccgcagcccgtaccaagcgtaataccaaataccacgtcataatcttgcccggcaccgtcgcaagcttctgatagcgcgaaacagttaccatcattggctatcaccaccggttgcccaagcaattgctgcaaatcagcctgtaacgcatgaccgttaatcacctgaatattcgcgtttttaatcaggccagtgagtggcgagatactgccgggtaaggcgatccctgtcagcatcggtcgttgaacgtcccgcctaatctgctcgataagcgccacaacgcatgagacaaattgttgatatgttgacttttgcgtcgggcagcggtaacggcgaatctcccagccatgcgcatccatgacaacggcggcgattttggtcccaccaatatccaaccccagatagtgcatatctcgttccttgttgcgtaaaaggcgggtcaccccgcccttctggcttagtacagtgatgctttaccgaacgaaccgaacagtttcattttgtggcgaatgacttcccgcgccgcgttaatcgcatccggatagatgacgttcgggtcccaccagctctctttagcgagaatttcacgcactttctggaaataggcgtatttcatatcgctggagatattgattttgccgacgccgagcgtaactgattcagcaatctccgcgtccgggtttgccgaaccaccgtgtagcaccagcggaatatcaatacgtccggcaatgtcgcgcaaaatgttcatttgcagcttcggctgcatcccttttggatagatgccatgcgctgtaccaatcgccacagccagtgtgtcggcacctgtacgagcaataaaatcggcggcctgcgccggatctgtgtaggtcacttgtgaaacaccaccttctaccgacgttcctgtttgtccgatggttcccagttcaccctcaaccgacacgccaaccgcgtgagcgaggcgaaccacttctgcggtcagcgccacgttttcttcatacggcagcagcgaaccgtcgatcattactgaggtaaatccgcagcgaatcgcacgcaaaacatgctctacagaggcaccatgatcgaggtgcagtacaaacgggaccggactacgctgggtaatttcgcgaacgtgagcgaaaaaggcatcgcccacaaaatcatgttcgctgggatggatggcaataatcgccggagtatttgtcgcttctgcttcatccacgactgcgcgaaggaaacagttatccgccacattaaatgcgccaatggcaaagccgtgctggcgggtaggttgcagtaattctttcatcgaaactaacatgttaaatctccagtttcagcgtgtagtccgccctgccggtgcgttattgcactggcataaaggccatgacagaaaatgaatcaggctttgccgatagagccgctcgcctgtaaatacggtgtaatcgcttcttcgaaggccagttccatagctttcagcgcgtccaccagttcaatggatatatcgtgacagagggtatgcaggagcgcggatttcccccgttcaaaaatggccgcccccacgttgatttttgctacccccagagtcgtacagagctggagctgatcgaacggcgtaccgctaccgccatgtaatgccagaggcacgctcgagcagtggaaaatctccgccagacgctgaaaatcaatagcaggtacaacaccaggcgcgtacatgccgtgcgccgtgcctaccgaaacggccagtagatcaatgcctgtctgcacgataaacggttccacatcagtgggttgcgtcatcatgtctgcattggcggcctggtcataacgcggcgcatctgccagatggcccagttcaccttccacgcagagctgcgcgctggcggcgagttccaccaccgccctggtctggcgcacgttttcctccaggggaaaagcagaagcatcaatcattaatccgctgaaaccagcacgaaacgcctgacgaatacagtccggatttttgccatgatcaagcgccagagcgaccggtactgaggcagattccgcgagcgttttaaccactgccgccgcgacgggtgcaggaaaatgcgccagatgcccctgatagagattgagaatgatcggagcgcgattcttctccgccacgcggatagctgcgtgagcactttccagattcatacagttgatcgccagcaaggcgtaatgttcatgccaggctttcatcaccatacttttcatatcggcaaacatagggcctccggttattcgagggtgaaagtgatctcttcatctttcagcttttgatcgctcagttcgtcaaactcttcgtcgcgttccgttaccggtttcttccagagtgaaagcatcacgccacaaatcaccgtgcctatacccagcgccaggcaaaacagcagaggatgggtgaacagaggcacaacaaacatgccgccatgcggaaccggactctccacgccccacaccatgattaagccgcccgcgaccgccgatgccaccacacaagatcccactactcgcagcaggtcacgcgcggcgatcggaatgactccttcagtgatcatgcagatccccatcggaaacgcggctttcagcgcctcgcgctccgcacgggtgtatttatggcgtgtcagtaagaacgaaagtgtgatgccaaacggagggatgattgagccgacaaatttcacggcttctggtccgtagacgccactgaccagcaagccatcggaaaacagcgacatggttttgttgaccggaccaccgaaatcgaaggttgccatcgcgccaagtatggcccccatcaggaagcgcgatccgccctgcatcgactcgagcaaatgaatcagtgcttcttgtaaccaggcgatgggtttaccaatcagcgtcatcattaacagcccaccgataatggtgcttaataccggcaacaccatgattggcatgagtccttgcatcgactgcggcaggcggatatagcgtttaagtagcaaaatggtgtagcccaccaggaaaccacccaacataccgccaataaatccggtatggatttgcccgcagagaaagccgacaatcaggcctgggacaaatccgggacgatcggcaatagaataggcaattgccgcgctaatcagcggcacaatcagccccattccccagccgccaatctgattaagcatccacgggattgttcctgttttttcaccaacatctgtaccgccaagaacttgccccaacgcaatacatatcccggcggccacaataaggggtatcatccacgagatgccggttaataaatgttttttaatttcctgtgaaaccggaattttattttctttcatattaagatccctccagtataaggatcatttgtttcccagtgatttttcgaccttttcaagaaattgaacgggcgatttaatgacgatctctgtctttactcgcacaatacgtttattggtgaagcgttcttctccttttattttcacatctacagcaagaatcacgacgtcagcagcagagatatctgccgcctgtaattcattttctgtaccaatggttccctgggtttcaactttaatggtatggcccagagcttttgctcctttgattaacttttcacgagcaatataggtatgagcaatacccgccgtacaggcggcaacacagacaatattcatgacatactccctgttatttagcagacatcggattgtgcatactgactaaagagatcaatgattttttgcggactcgtctcaactaacaattgttctatgatgtcatcatccgccagcgcgcccgcgacctgggaaagtaaacggatatgggtggtattttgatcttcaagacgtaccgcaaataaaataatacagcgcacgctactgccatccagcgtttcccagggaatatcctggcgggtacggccaattgccagcgtagtattaattaccgcagaagatttaccatgcgggatcgcaatatgattttcaaaaccagtcgagccttccgcttcgcgctgccagacatctttaataaaggtttcccgacaatcgatcgcaccatcttttttgagaagattagttaattcttcaatcgcctccgctttattcgttgcttgcatatctaaaataacgcgattcgtattcaggatttttgttatgtccattcgtcatacctcataaaattctgacattaaatttcaacgacccgagacgtcgcatgatgtaatttttccgtaatcaccatttcagtgacccgcttaatatcggcatcattaaaaaaagcggtaacataagcgaccggcatagtgactgtaggcaaattaatggtcgaaataatcagttcgatattgtcaggcaaaacctgtgataaattcgctgctgaaataacatcaacaatcgtccattcaggaaatgctcgcagaatacggcttttcagtagatgcgaagttccgattccggttgaacagaccagtaatacacgtttacgggcaatttgccgctccatcgcagcctgaaaatgaacggtcaggtaacccacttcatcctcgctcactgcattctcaccccaggttttaaatacctgattcaccacatattgcgtcaaccgccagacatccgctaattctgctttaatatcttccagcaatggattacggatatgaatgcgataatttagacggttaatcagcggcttaatatgcaccaataagccatcatataatgcgctgtcttcactaaaatcgcagtccacgatgtcactgaataccgtaattaaacgccaggtaatcagacgcgcttcattgctggcctgcatatgtgaaataatgctaacatctttttgtccatcaatcgccacacctgatgaaatgatatattgataaataaaccagacttcatcatcgggcaatgtatgtgcaattcgttgatctatcttatgaatcatctgactggcaacattaaagatattttcatcatattgtctggtttgatcttcttctcttgataacgcattcccgtgcgtgttgcgatacatcataataaggatgtgagtaaaaatgttaacgtaataaggttctcccaaagaccaacttaattcattttccatatccagtaacaatgactggacaaataacacctcttcttctccaaaataatggactaatgctttatagcttccgggatccagacgtgaatacacgacaccttgcggctcattatggttaataatgccgttaatcagtaatgccattgcctgtcggacttgcccttcactaccttcaatatgcgtaccacttggactgcggatcaacgataaccccaacggcgcaagccaggactcaattactctcaggtcattaacaatagaggctccgctgataaagtagcgttctgacaatttactgatcgacgtttcattcggtgtttcacttaataactgcgacgctattttaacgcgcctggcattattcattacacaatcaatctcttcacattctgccaccaacaaatgatcaagatgcagcaaatcagcaatattctccgcacttaacatcacacccgcgccagcacgcttctcaacatttattctccattgtcccagccattgctcaagtaaacgtaaatcacgttgaatggttttttccgaaacatttaaatagccggcaatcgtaacaatagtcgtatattcccttcgaggtaaaaggaatcgtaataatctgttttgtcgcgaggtaatcatttgcattttttacccttatcacaccatatggaagagcttcagttgccatctctgagggtaaatataaagcagaataatttcacaacaatactaaaatctgtccgtaatccggacagtgataaaacaaagcaaggcggttaagggatatttttcagcacagatcacattttcgtgatgaataatcgtgatcatgctcgcaaatacgatggaagaaatatttattaccagatgtgagattatttaccggatacgacacaaaaccattcgtatccggcattcttcaatagattacaacgtaattgtcagcgcattcccttgaggagtcaccaccagtccctgctcactttcagcctgcgaaccgccttgcagaccatttactttcacaatattgcgcaagcacagtgtccagttcttcgcctcgcccgtaccagtcacagtaatcgtgttgccagtacgtgctgcttttaaagtaaagatcaccgaaccgtcagcatcgggcacttcacagacggcttcatgcccgtcttgcagattaaagaggtggaatgccgtaccttcgtgccacgcgtaatcgggacgttgatcgttgttgcccagcgccagtagggtgctatcacgcacataaacgggcagactcaggaagctgtgctgctgtttatgccagcgactaccgtcgagttcatcgttgtgccacaggtgtgtccagcgaccttccggcaggtagaactgcacatcgcccgcttcagtgaacacaggcgcaaccatcacgttgtcgcctaacatgtattgacggtcaaggtaatcacaagccggatcgtccgggaactccatcatcatggcccgcatcatcggcgtaccccgcgcgtttgcacgtgcagcttcacgatacagatacggcatcatgcggcatttcagttgcgtgaagaagcgcaccacatcacaggactcatcatcgtaggcccacggcacacgataagatttgctgccatgtaaacggctatggctggaaagcaaaccaaacgcgcaccagcgtttgtaaacgtgcgccggagcggtattttcaaagccgccgatatcgtggctccagaagccaaaacctgaaaggccaatagacaaaccaccgcgcaggctttccgccattgattcgtagttagcgtaacagtcgccaccccagtgtaccgggaatttctgcgcaccgacggaggccgagcgggcaaacaagacggcttcttcctcaccaacggtgtccttgagcacgttccacaccagttcgttgtagatgtacgcataatggttatgcattttctgcggatcggaaccatcaaaccattgaacatcggttggaatacgttcgccaaagtcggtcttaaagcaatcaacgcccatcgcgaccagacctttcagtttgtcggcgtaccatttgcaggcatccggattggtaaagtcataaatcgccagacctggctgccatttatcccactgccacagcgaaccgtccgggcgtttgagtaaataacctttctcttgtaactctttaaagacgggggatttttgcccaatataggggttaatccagacgcagattttcagccctttcgctttcaggcggcggatcatcccttccgggtccggaaaagtcagcgggtcccactcaaaatcgcaccactggaaggctttcatccagaaacagtcaaagtggaaaacatgcagcggcagattgcgttccgccataccatcgataaagctgtttaccgtcgcttcgtcgtagttggtggtaaatgaagtggttagccacagaccgaaggaccacgcgggcggcagcgccggacggccagtaaaacgggtataacgatcaagtaccgctttcggcgtcgggccgtcgataacaaagtattcgagatattcactctcaacgctgaactgtactttggagactttctccgatcccacttcaaaagagacgcattggggatgattgaccagtaccccataaccacggttagtcatataaaacgggatatttttatacgcctgttcagtacttgtgccgccgtcccggttccaggtctctaccgtctggccattgcgcaccagggcagtaaagcgctctcccagaccgtaaactgtttcgccaacgccaagatccagccgctcaaacatataatttcgttgattattcgtgtcctgcacgtagccgttatttttcacctgactaccggtaatacgttcgccgttgcgcagaaaatccagtgaccagaactcacctttgctgacacgcgcacttaagttgccacttttaaactcagcgtaacgttctgtgttttcgatagtgaccttcacgtcctgcaaaatattgagcgggtaatgaggaccgttattcagcgccccctgaaaatgctcaatccgtacaccgacaataccttcctgtggggagaaaaagcgcagcgtaaataaaggcgtatcaagctgccaggtacgttcacgcacatcacgaggggcagcatagaccaccatttcattaccctgctgttcaacctcgaacacctgaagcgggtgaatcaaattgaggtcaggttgaatcaaccagtttccgtcgctaattttcattgccgttccttagttctgcacttcttgagaggtgaattgttgctggcaacggcgtttgccctgcgccagctgttccataacggttttcagattgtgcgtcgtgagcgagtagtagcgtttagcgataatcgcgctcagcaagtaacagatcgccggaacaatcgtgaatagcgcgataatgatgctaattgtggcgctgttctgcgctttttctgccgcatcatatccgccataagccagcatccagccgataagggcaccaccgaaggccaaccccagtttgagcacaaacagcgtgccagcaaaactgatcccggtcaggcgtttaccattacaccactcgccgtagtcgacggtatcggacatcattacccactggataggtgtcaccagttgatgcaacacaccaatcacgaagatgaagacaaacatggtgatgctggcctgcataggaacaaagaacatcgcgaggctaatcactgccagcagggcgttcgtccaccagaagatagtgactttacatttccagtcggtcagcggttttgccagtgcggagccaatcaggttacccacgcaataagtggtgagaaaagcgacaaacacttccggcgtacccaaaatccatgtgacgtaatacatcatcgccccaccgcgtacgcacaccgccaggatattgaaaattgtcaggaaaccgacaatacgccactggtcgttttgccagatatcacgtaaatcatcccgcatagacgtcgttgtaggtggtgcttcaacgcgttctttagtggtgaagaaacagaatgccagcatcataaatgccaccacggaaaggaccgcgataccgccctggaaaccgagtggtttattatcaccaccaattaaattaaccagtggcatcatcagaacagtagagagcatgcctcccgcggtcgccagcacaaaacgccaggattgcagcgagatacgctgagtcgggtcattggtgattacaccacccaatgcgcagtaagggatattgacgatggtataaagtaaggtaagtagggtgtaagtaattgctgcataaatcatttttccgttcatactgagatctggcgtgctataggccagtacacagacgatcccgaatggcagtgcgccaaacagcacccacggccgaaatttaccccagcgagagcgcgttcgatcggccaacaaccccatgcaaggatcggaaatcgcatccagtgcacgagcgaccaaaaacatggttccgacaaatccggcaggaatgccaaaaatatcggtataaaagaacatcatatataacattacgttatcgaaaataatgtggctggcggcgtctcccatgccataaccaattttctctttaacggacaacacttcactcttcatctgcttttccttgatgctataggggtgctgagaccgataacgcattttgtaaaccatccctgcgagagcgaatattccgatatctggttattaatttatgattcttgttttatgtgatcgtggtagcgttaatttcgctaatatatcattgtaaaatatgagttttatatgaactataatgctttcgtgataatacgctgcgtgtattaggcggaaaaaactgatctgggggatgtagaaactcaaggaagtagctataatgcgccccgcctccatgtagcaatcgaggcgcggaagatcgtcgtctccggtgaggcggctggacttcaaatccagttggggccgccagcggtcccgggcaggttcgactcctgtgatcttccgccaaaatgcctcttctgaactctcccgatgtcaacaaaaccccttctaatcccttatatatcaggttttctttatatcctgaggtcaaccgacttcaacccacatcaagttgtttttgggggtgcattcgggggtgccatttccctcttaaaatatcagcacccccataatggtaaaaatgtgagatataacaaggggttttaaagacatctttgctatataaggggtgcattgggggtatcaggttggttactggcagaaatccccccaggaggatggattcatcaaaagccggaggatgtcatggcgctaaccgatgttaaagtgaaaaccgcgaagccaaaagaaaagccctataagctggctgatagcggcggtatgtatctgctgattaacgctaatggttccaaatactggcgtatgaagtaccgcttcgctggtaaggaaaagatgctgtctattggcgtttaccccgatgtaacgcttgccgacgctcgtgagaaacgcagtgaagccaggaaaatacttgcggctggtggcgatccgggtgaggcaaaaaaagaagaaaaaatcgcgctgcaaatgagtttgaaaaacactttcgaggccgttgctcgcgagtggcatcagtcgaaagccgatcgctggtcattacgctatcgtgatgaaatcatcgacacctttgaaaaagatatctttccctacatcggtaagcgccctattgctgaaattaaaccaatggaactactggaagcactgcgcaagatggagaaacgcggagcgctggagaaaatgcgcaaggtccgtcagcgctgtggtgaagtgttccgctatgcaattgtcactggcagagctgactataaccccgctcccgatcttgccagcgcgttagctacaccgaaaaaagtacatttccccttccttactgccaatgaacttcctcacttccttaacgatctggcgggttataccggcagtatcatcacgaagacagccactcagatcattatgttaaccggtgtacgcacgcaagaactacgtttcgcacgctgggaggatatagattttgagacaaaactatgggagatcccggcagaagtgatgaagatgaaacggccccatattgtgccgctctcagaacaggttattacgctgtttaaacagcttgaaccgatatcaaaacatcatccgctggtctttatcggcagaaacgatccccgcaagcctatcagtaaggaaagtgttaatcaggttatcgaattactgggatataaaggcaggctgacggggcacggtttccgccacacgatgagtactattctgcatgaaaaaggctttaactcagcgtggattgaaacgcagcttgcacacgtcgataagaacgcgattcgcgggacgtataaccatgcacagtatcttgatgggcgtagggagatgatgcagtggtatgcggattatattggttccctgacaagagagaatgttatccatggggattttaagaacacaatctagcagtcaaagatattggaaactctgcctaatgaactggctaaaaatctcaaaacccctgaggatctcagccagttcgatcacctgctgcaaaattagcgttgaggctgctctcaactgaaatgactgtaatgctccagtgagggcgcattacccatgacgcccaaaaatcgtcttctcgttctaggcctctgcgtcctgctactttatgaaatggtcgtaagccgctttaactccactagggatactagctggatcaattaaagcgagtgtagctttaaatctcgcacggcatgacggtaatgcgtttacacggcgcccaagactattgtcattgttgcttgccaaacgaatcattgttgcaatttcccttggagaaaagttacgaattaattgttcgtagcttgtagctgcagcccaacaaacaccgtaaccattgccaatattgcagcagacaactacctgaacgaattgctcttgtgcagtttccggtaccgctccgtgtagcgacagttctaataaccgttctgcaaatggtggctcgttgtagaaattatttgttccgttatgcacattccaaagtcgctcaattgctcggtagaagacagcatgttgctcagactcgtttagcagcgtcaaaagaccaagtttctcgaaaaattggagagatgccgcatgacgtggctcgtctccttttgctgcatactcgctatgtttgttgacaagatctgagcgaagagatgcagtaaaaatttcttttagtgagctgcctatatccaatgcgttcaaacgcgacggttctgatgtatttggatcgcaatagataccatgcaccattccaaccagcatctgacgctgagcatcgtgtgtatctacaagtctttgcacccacacatcatgttgattcgcattaaatctaggacctttgactgccgagataaatgccccaatgtctacccctttcggagaggatgcatcagctagagcataacgaacgcatcggtttaagaacgttgtaaattctcgatcatttacgctgcccattgtcggatgggcagccgaaaagttattgcgaacttcacgacattgatcaagaaaaaagaacccatcttcgttaactaggtttagcttgagtgcaagttcaagaagtcggctatcctgaagctccaatagatgcttttcttcaaagtccgattgcagaatctgcgcgacaatgggtaggccaaaattccgtatttttgttcttagctgaaggatagcggcattccatgcgtagttcattgccccatcaaataggccagtgctgacagcaacacacattctggcgaccagttcaccacgaagatctggtggaatttcacgcagttcacggggaaggtcgcgccatgcatactgaatttcctcgtctcttgccaaaacatgacgggggatacccaatgatgcagtaagttcggaaatggcaggcagaatagttgtaggtaatgcaggaagtactggctctggcaattttggtacgagatctgacaattttagactcctttcgctttggttgtgatactcaatttagatcaaagaaatctcagaataagatctaaggtacgtaattgtctgtggtttgactacccctttgcattttacttgtcagtgccagccgttttcaaagtaatctaccatagccaacaaaatctgaccgtaaccgtttagggagcctcatctgaacagtaactctatggtatgtttcgaatccgttggttgaactcgtagatctaacctgattgtgttctatccgataagattagagctaatacatatcaaatatagccgtcataattgacggcctatttttattcagataaaggatctactttgttttctctaataagatttcgtaaagcagtgcgtgcagcagcggtctctgtcattccgttaagatctacgctggattgcccacctcttattccaaaaactgtaaccataccatcctcatagaaatactcggcctcatacagaagaccatctttctctacttgtatatatggcataactccctcctttgtaaggaattaaaacataaaattatctatagtaacccctgacgaccaattttagggttgttagtaaaaattgtcgtagtaatcttttcgctcatgttttcaggaggatgaggattttcaatcactattatttgactattattagtatgatacttagaaagatattcatagaatttttctttaagatcagttccttgtaaagcaacatcatcttcaccttctggtttataataggcgaggagaggtgaatctaaaacaaggaaaccggggtgaggtaactcctcctcctgacaaaactctagtaatgcgacactaactgctgcatgtgtaatagctcgtagtccctttcctcgactacctctgggcttaccatctatcacaaagtctgaagcaactttgtcgaaaaatacgttgcattcaccagggaaattccatgcttttagtatggaggaaattttcaatgaaaggttatgcattacagaatcagagggaccaatttccaactgagttttctcatgtacaatacaacttttattcaataaatcggcttttcttttttccagccgttcccttcttataaataaatcaacagacctttgaatttcagattttttatcaactaatgctgtataagcatggctaaaattatcaacttttggagcaactatatctcgaattgttttatctaaatgctgataagtttcctcacattttgagtattctttttttagatgttgctcttcaccacgaagatccgatactgtattatttagctcactcaacaacgtttcaattttaactatctcggctgtagctgagtttataatagaattaacgtccccatcacatattttttccagatcttgatgatctggactagctccacaatgaggacaaggtactgcttcaatatgcataaaaatcaacccactttcctgaattgatttgagacgatcaatgtctactacataatgctcatatagtagagtgaacctggctaatagttcagagatttcatctaaccgcttctggatgttatttttagattcataatattttcccctttccaataacaggttattaagctcatcttgttgagaagcaagaaaattacgctgtagcataattgtctgctcaagacggctaaactgcgataatatatcgctgcgaactatacccaaatcatcaatttcattatttagctcaataataaactcatctattaatacaatctgtgctgaagtgtcagtattagtatctttaatgttttttattgaagcatcatctacacctgtaagcaaaagctttaaggttgctaactcagaggttttatttgtaggattatcggataaaaaaggcgagcctttcttttgtatttcaccttcctgaatcagtgctaatctggctaaatctcgaaaacttaaccctcgagttgttgccttatcacgacttttcaatatctttttattaaataacccaagctgctcaagcataaagcctgacagattatctctttttccttggacgtgcttttgtttaagaggtacgtcttttaaattatggtcatccaaatcagttagagtaaattttccaccagcaactgcacgatgaagacgccaacgttttccagcattactaactaaatagagttcaatctccgtgtaggtggatagttctacaatttcccgtaacttctttcctcccaacatgaaatcaagagattccgcaataaaagacttgcctgtatctgaagcaccgcaaatcgagttgaccccttcagaaaaagacaaaactgattctttattttgcccccgaaatacaagcttgcgaatttgtaaataattttcagccataattatcctccagatgactgaatattttggaactgactcgaccattgttgaaagaatcgatgtgtaatgttccgtatttcctgaattgttaaatcattaaattgtataaccgcccactctgcacatctttttaatctacatgaatattcagttgtaagagatgccataaaaggagctgcaacctcccccgcctgatatctaaatccatcccttgctgcaactctttgcactaatcccctgctaatcatgagcagtaatcctttttcaatcaaaccatgccttactagtaattcacctgcacgcataggtagaggtgcatgtaggcttgccgggccattaacatcgcctgaatgaacaacgaggtaatccatttcaacgagccgttgtaagtcataggcttcaggaaatgccgcaactaaaatcgcaagtgaacgtacaccagcttcaaaaggactattgaatggctctgtatgtaaattatgtttcattattaggaacccaattcaaacgatcatcgttagccaattggtgacaaataccttgacgatcttgagttttaaaagacgatactaaagggttagatgttaccgcgatgatggttgcttgcttgattgttgctttcatcctttcaaatccactgtcatggaaatcttcacatacatcaataactccatgaaaaatttcatcctgtaattgatcaaatgttcccgcaggaactgtatctcgcgcaaaatttttcagtgactcggcatggtaaaaacgctcacgctgacgtaggtagtctcttttaaactggttatgtgaatctaagaaagtagaatcaggaaaatgggtacctaaatgatctccataagcatcaaggagttgacgtagatagcgactctcattatcggctggtttatctggcggcaaatctggattcggacgacacggcaatccaccaccaaatcggactgagtgaaaaactgtttttgagtgtacttcaataagttcaactaatgattttgaagagaatatagtgaaatcaaacatatcaaagtaggtttttaactcaccagtcaatgggacatctatgacagatgaaattttgtcttggcaatttttaccccaattttcagctaatttttcttttaattcagtgggcttatttagcaactgctcaagacttgttccgattccctgagaacagacaaaaaaatgtttacgtggcggcaaatattcgcctagaaatgaatagtaaatgatcttacccatctcaacccaaacctccccgggcctgagaggatgatcatatcgtttgcattgataattgtcccataccgcttcaaaaccgttttttgaacaaaaaccagcgatatcaataccaagatcccctgaaccaccaaaacgtctaacggttatatattcatttttaagataactagcccattcttcagtgaactcctcccattcagcagggctgaaagattgaactcgtactgacttaggaatgggtagcccatcctgtatatgcatagttgatggaaccccaccggcccatttagggtgtatatctcttagatcactttctaaaatcatctgacatccctcataggtactatcatatcgctttatttgctgatcattttttaaccaattgattaattagctatttatgattataccgtgctttttgtcgctaccctagctgaaagaaaatctcatcatagctgatcgtttttaggttgtttaaccaacctaatcacgagttatacgttcattgctcgataaaaattttcataagcaaattattcctatgaaacagagctcctctgttcggcattagggaatctgacaggacgtgtcgtgatgttgaagatggcactctcaaacaagaaataatattattaacttcaattagttaaatgtatttaattatttcatcatttttccattcatctcaatttagtacgacataacgtgtcgtacctgtacggcataatctcccgtatcaacaccatgatattttgggagaacaggactgtccccactatgaaaacacagcatgatcatcatgaccgcctgtctgtcaggctatcagtcattatcagccgcttactggctggtgaatctctggagcttaaagtattagctgatgaatttggtgtctcagaacgcaccctacagcgggattttcagcaacgcctgatccatctggatcttgagcatcgcagcggaagttaccgacttatccgccaaacaggccgggagcacttacccaatacatttgcgtttatacgtaattcaggaatttcaggaatcattccggctcaaaaccgcaagttgatccggttgattgccagcaattccggcgtatcgccgtgtcttattgggcatggggcattatcttctcccgtcacgcagactgcctgttttctgaaactggcggaagctatccgcgactaccgcgccgttacattattggttaacggtaaaagctacgaagcagtagctccccgccgtctgatatttcagtccaaaaactggtttcttgttgctacccgcaccagaaatttacaggtgtttcggatggaagacgttaacgccgtaaccgttctggatacctctttccgcagaaagcctgaacttgatgctctgactgccagtgaagagtttatttcagccctccctcactttcgtttcataagtgacgtaattcagaccttcagagagtaacagacaacgtttatttcaaattaaaaaaggagacctcgtatggatgacccggtaaagggcgaaggccggatgattactgatgccagtggcgtcaccagaagggaaggcgggattttgggaatgtggagcaatatatttccagaacgtaatggtagcaacgagcaaaaaggtgatagcacaccgcgcatacccgacatcagggatattcttgatattttccctcagccactgcgggaaaagctgttgaacaaaatcagtgaagccatcgactatgaacccgtgattggtgtcatgggaaaaactggcgcggggaaaagcagcgtatgtaatgcgctgtttaaaggggaggtttgtgcagttagcgacgttgaggcatgtactcgtgaagttcaggaattgcatatacgcttcggaaaacattcgctgaagataattgatatacctggtgtcggtgagaatgcccggcgggataaggagtatgaagatttataccgcaatttgcttccctccctggatctcatcctgtgggtaataaaaggtgacgatcgggccttttctgcggatgagcatttctacaacaatgttctgctccctgctggtgggggtgagcgcgttttattcgtccttaaccaggttgataaaattgagccattccgcgagtgggatactcatctgcatcagccatctcctgcacagcgcatcaacatcgaaaagaaagaagcctacattactgaacgatttggttttacgcactatccggtgacacctgtctccgccgatgagggctacaacattcttcgtctggtagagactattattcgggctttgcctgatcgggctaaaagtagcacggcttcgcagtttaaggatgagttcaaaaccgaagaggtcaagacggaagcaaaaaacggcttcggcagcgtaatctccgggatactcgacgacgttattgattcttttccgttaccaaagcctgtcaaagagcttacccgtaagggtaaagacaaacttatcgagtgggctggtaatgcctgggaccatttttttggatagggaagtgcttaatgaaactaatcattatacctgcattgtttgtatctttatttgcattccaccctgcttatgcagtcggggcctatgacctgcaatgtatgcttgataacggcgagcaaatgacactcagccacgtcagcaataccgtttatatcagttttgaaaatcctggcggtgactccgaagagagcggctctgttattaaactggatattccttccggcgaagcgaaacagattctggcggctaatccgggagcaggaaccgcttctttcacattacgtggagaaaatgaagatatcgaaggcgcggttgcagtcaattactcagaatatgatggtacaggtgatgcttattacactgtcatgaatgcaatggggcaggaaaccagcacagtatcatgcaagccgggtaccattaaggtttccagaagcctccttcagaatggcattaatggcgttggtagccagcaggctaataaacctgatccctctcagcaacagcaggcacagcaatctacgacaccaccgtttaaagttcagttcggcagctccgtcagcaatgaaggctggaataccaaatatggtgttattcagctcactatcactgatgacaacgtggtgctgaaatccattcgggtaaacagagggaactgtaaaatggagagcgtcggtaacagaaccctgccagccaaatataaattcggtgatgtggctacgttcaaatatatgaagtgtgaccgtatcattgaagctgatattgtgaccgatacggggagctggacatttaattcctaattttacctgtagcagcatccggggaattcctgctaaataaggaggctattccccggttaattatttttcgacaacgttaaacgaaatgtatttcatccgggtataatgaagttacgcgtcgatagatgcaccgcaacggtcctgtcaggcgctcactgatatagcgttacgggtaaagcgtgtagagatagtgtcaggggattaatagcgggattcttcaatacgttccgtcagccagcgtttaacttcactttcccgccagcgggaactacgccccagtttgataggctttggaaacttgccttcactaatcagtttataaaaccatttgtcagtcaggccagtaaacgtggtaataaatgccatcgtcaccagtttgtcattcatcaggtcagtatcggtattcagttgattgctcatgacgattgtccttctgtctttacgttgataaaagacaggagcagcaacactaacccgttgatttaagatgatgttgcatactccgccattacaatcacttctccggtaataaattacttatccctgactacaaccaaagttacgttcaccgtcatcgtggtttttggtgtactccttcgccagataactgatgtgatatatgtagctgcggaaaaagtccgtatttgtgccatttctgcgatcaagttcataagagacgcccggtaaatgaaaggggactttatttgccatatctccggtacgcctaagcgccacagcccatgcccgcgccaccattcccaccagcaatccgcgaggttgcgctgaattctccgtattcagcatggtgtttctgaatacttcccgattaaccagcaacagcatgtgataatgcttgttgccattcagttcaccaaattctcttacccatgcatatcgcagcttacagggataaacacgtttaccgtctctcctgcgccgttgtaaatatgcggctatctgcgctttcagtgaggctataaaacgggtaataaccgctgagtcataccctttatggctattatccactggcagtaataaatccactctgaaagccagtattctggcgtaatcatccatcgcataacgggtaatctcttccagacgtttcatatagtgtgcattaggcttgccatatcgttcattcagtttcatgcttcagttccttgtggttggttacatatccataagtgctgtagtaacttttcactgagctatgccgatctggattactttgccctgtctctggtgtcatccctctatatgctgaatctaatgaatgagtgataaacataatattaataccggcaatgttgattcataaagaaagggtgataaaaagagtagaagcccggtatttactggtgttcgtagttaattatctgttcctgaagataaagaatttcactcttaagttataattaatacattgacctaatctatgggttgcagtcatgaatgacatcttccagatgtcaactcgttatcctgggaggtttcacccgtaaagccaccagggctatacgtggaaaaatttaagactatccagccgttttctacaggcgggatctgtgagtatggtgataaataaaaaactacgttaatggtactctattactatggaataacacgatattgctacgtgttttccacttttattgatttattgctacggttttacttcgaaaacacatcataatcacgctattgatttcgaatgatttaacaaggatgacgaggtagaacaatggccgttaatgtgcgctcatcaatagcagtgaaggatatccgaaccagcaggttcctcttctggtacatcaggaaaaacattcagggagcaaatcaattcgcgtttgatgggaacaatccagatacatccctttcggagagaattattaatacagccctcgaggccgggtatcccgatcccattcagcggggcaattttattcgctcactggaactggcgattaatacgacgcttctgccggagaaatattttagttggttaaaagaaaatgaaagagcgacgttctggctatggggcgtgatgtgtcttgattaccgctgtatggagtcaattaacgaaaagttgggcacaaatttaaacattaactggtatcagaaagccggaataacagattctcctgcaagccatagcgaaagatactcaatcatcgttgcattactggactatattaatattgagactaatcaggcaccattgatgagacagtggctatatgagaggcttgtattctggagggcaaatgaacatcagagaataaaattacgctggcttactgaggataatagtgaagtctgtacatgggcttataattacgttaataaattccagaaagagcacggcggtaatacaggaaaccatttagaccccgttcagattccggaaccactgaatagtgtagaaacctatcatgccatttatgccatgctggatttatggtcagcggatgatgacctccagcagaaagcggtaaagaaaataaataaagcgttttaccaaaaaaacttcagacgtaaactttctgaaaaacgggaacgggagtctatcagtgatacgcataaagaacgtctgtattttctggttaaattttacaagtcagataaaatatctgttattgaaaggctaatagacgaaagggttcagggaatagaaacaagattatcccgtggttgaggtgtcatttcaaacttaaattctcccggtgataatcaccgggagaattcagatatgtattatttcagcactatatcacgctcatatatgtactgccggaatgtaatttaatatctgctcgcacctattattttatcccacctatactaccgtccgttttaatcacggattaaattagccgcaattttccagaagatgcggcctgttttttatattctttattaaggaatttaccatgaaattagccagccgctttggtcgcgtaaatcaaatccgtcgcgatcgcccattaacgcatgacgaattgatgcagtatgtccccagcgtattcggggaaaataagcacgaatcacgcagcgaacgctatacctatattcccaccattaccctgctcgataacctccagcgtgaaggatttcatcctttctttgcctgccagacccgcgttcgtgatgtgggtaaacgtgagcatacaaaacacatgctgcgtctgcgccgggaagaccagatcaatcacaaccaggtgccggaaattattctgctcaacagcccggttccagttcttatcagatgctgccagggctgttccgttctgtttgttgtaacgggctggtctgcggcgagtcgtttggtgaagtacgggtaccgcataaaggcaatgtggtggagaaagtgattgaaggcgcttatgaagtcctcagtgtttttgaccaggttgaagagaaacgcgatgccatgcagtcgctgatgctgcctccccctgcgcaacaggcgctggcaaaggcggcgctgacttaccgctttggcgaagagcaccagccggtgacggaatcccagttactggctccccgccgctggcaggatgaatccggtgatctgtggacgacctaccagcgaattcaggagaacctgatcaaaggcggtttaaacgggcggacggcaaaaggtggtcgcacgcacacccgcgccattcaaggcatcgacggcgatatcaaactcaaccgcgccctgtgggtgatggctgaaaacatgttgcaactggcctcataaacaacgctattaatggtaaaggaaacacgatgtctgaactgatgctaacaccggtattttcggtgagtgaacaacgcgttatccgccgtgcgatgcgtctgctggagaaatatcaacgcaatcctggcgaatcttttctttcctctgacgccacaaaaacctggctgcaactgcatctggcacgacaggagcgggaaatgtttgttgtgctttacctcgataaccagaaccgactgctggaacacgaaacgctatttctcggcacgattaacagtacagaagtacatccccgtgagattgtgaaatctgcgctacggcacaatgccgcagcagtaatccttgcgcataaccatccctccggcgtggcggaacccagtcgggccgacagacttattacaacgaatattgttaagacactggatttggtgaaagtgagggtgctggatcatttcattattggggcgggggatgtcctctcttttgccgaacggggctggctgtaatgctgcaaaaggacaaggtcatgcaacaagaatgggggcttccctgtaccgtaacaccacgcttcactgctcgactggtacaggaaagacataacctgcattacctggctgatcgggccgcaatcaccgggaaattcagctccccggatctgctgcatatcgaccaggcttttccggtgttgatgaaacaactggagctgaaactggctgacggtgaactctccccctgccaacaacgtaccgtcacgctatacgccaaaggactaacctgcgaagccgatacgctgggttcctgtggttacgtctatatcgctatttatcccactcaacgctgagttttaacctccttaatacggaacatcgttatgaaaattattcctgcaacgacgctgcgggcgacgacgtcatatctgtctcctgtcgtggtctggcaaacattactggcccgcctgctggagcagcactacgggctgaatcttaatgacacaccattcaacaatgaaaaggtgattcaggaacacatagacgccgggatcactctggtcaatgccgtcaattttctggtggagaagtacgaattggtccgtatcgacaggaaaggatttagctggcaggaacagacgccttatcttcgtgcggtcgatattttgcgggcgcggcaggcgaccggcctgcggattcagtgcaaaaacacgaatataatcagccggatggctgattcaagacatgataaaagactttaccagcgcacgtttaaagcgtgcaagagatgttattatactaaaacataaaaacaggcgaggctggtgtaatgagaatcgacaaactgtcactgcttaactttcgttgcttcaaacagctcgatatcacttttgatgagcacattacgattctggttgcaccgaatggcgcgggcaagacgacagtgctggatgcggtacgcctggcgctgttcccctttattcgtggttttgatgccagcctctacgtgaaagataaatcactagcgatccgtaccgaagacttacgtctgatttaccgccaggaggcactgaacatggaaatgtcgtctccagccaagattacagctaccggagaatgggcaagcggaaaaacggcaacctggatgctcgataaacgaggagaacagccgccacatgaagataagatggcggcgcagcttacccgctggggtgagcaactccagaaacgagtacgtgaagagcatagcttgcaacaagttgaacttcccctaatgctttatttggggactgctcgcttatggtatcaagaacgttatgaaaaacagcctactgagcagcgcctggataatagtgccttttcacgtttgtccggctatgacgattgcctctcagccacatctaactataaacagtttgagcagtggtatagctggctatggcttagctaccgtgaacatcaaatcacacaacttgaatcaccttcagcaaagttaaaagaaggtgttcgtgttcaacggatgaaagaagccattcaggctatccagcaggccattaactgtctgacccagcaggtgacaggctggcacgatctggaatacagcgccagccataaccagcaactggtaatgagccatccgcaatacggcaagatccccttatcccagctcagcgatggcttgcgaaatgccgtcgcaatggtggcagatatcgcatttcgctgtgtcaaactcaatcctcatttacaaaatgatgcagccttaaaaacgcagggaattgtgctgatcgatgaagttgatatgttcctgcaccctgcctggcagcagcaaattatccagtctttacgcagcgcatttccgcagatccagtttattgttacgacccatagcccgcaggtgctcagtacggtaaaacgcgagtccattcgtctgcttgagcaggatgagaatggcaacgggaaagcgttgatgccgctcggagcaacctacggcgagccgagtaacgacgtgctgcaaagtgtaatgggcgtcgatccacagcctgcggtgaaggagaaggcagacctgcaaaaactgacaggatgggtggatcaggggaaatacgacgagccgaaaacgcagcaactgatggtcgcattggaagttgcgttgggtgagaagcatccacagcttcaacgcttacagcgcagtattgcccggcagagactgctgaaagggaaagcgcaatgaggcatgtgatcaaaactcaacttgggaccgttgccttactgaccgcacatgaaaacccaccacaagatgctgatcaatcaaccaggcgctggcgaaatttcagaagagataaagccgctgtaatggtccagctcattaacgagcagtatcacctttgttgctacagtgaaatacgctctgatcttcgtggtcttggttatcacattgagcacgttgagaataagagccagcatccagaacgtacttttgattatcagaatctcgctgccagtgcattagattcaggggagaacggcggtttatcttccctgaaaggaaaaaatgcttttggcggtcatgcccaaggaaaacaagatgttgtagatatggcaaaatttatccattgccatattcgcgattgttcccgttattttgcttacctttctgatggtcggatagttcctgctgatgagttaaatgcacaagaaacggagaacgcgcaatacactatcgatctactgaacctgaacagcggattccttcaaacggaacgtcgtaatcattgggaagagctggagcagctttttgatgaacacattgaaaaagattgggatttgcagcaattactccagcttgatttggtttcaacaccagaccataaactgcatgaattcttcagcattacacgccagtttttccagcaagaagctgaacaggtattacagagccacgccccagcattaatttaacaccactattcctgattcagggcgacagcatgatttattgcgagtcgccttcctgatttacgccctcaatatttattcacctttattttaccgcataatgcgcctgccactcccggcaggcgtgtttgcttttatacgaacaaaattatgcaaacagaagctgaaattttaatcgataacaacgagcttatttgctccactaggattgaatggatcgttaccgttcaccagaacgcactacagcaactcacatccctgatgcaaccaatcgcagaaatctcccgcctgacgcagcgtattggcggcgacataattattaacgacatgagactagatgtacgcataacatcgtcataaaatgatatttttagaaattagctaagtgacatatatggcagatgattattttcatattacgctgaatacccggcttccatggtcaaataacgagccaatggcagtaggtaatagcataacaacgaccgatgttaacccattctttaactattaaatatcttacccatatctcagagaaacatttatcccaaatggggtcacccacgatatcagccgtatagcccttctgggacacattgcttcaggaaatctacataatagcaatatgcggtatgtcgcaagtatcggccacgaaacagctaaacatttttgtacttatgtcagagagctaatctgggaatcagtaagaacatcagaatttccagaactgccatctcgccaaaaatgcatttggttaacaaagggggaggacaatcttcattactggattgagcggcttggacgtcccgcagagcagataaccgtattcaaagtactacctgatggaagaatgcatactaccagtgagactcatctttcaggagatgctgaatcttatctggaaagcgtcgaaaaatcccgtcgatactggaggggagaaattgataaccccttacatcaggagatactcttcgaaggcacaatgttagttgaaagcaaagtgtccatttaacaaatgttggggtactgtacagaaaaacagtgaactgctcacaaacgattattctgcattttggactctattgccggtttgctacaatggaaaacagtacctaaaaagtagctcaggaagcccccgaaccctacaagtaaaatcatttgggggtgcttatgggggttactcatttacataacacaaataaatcatattaaatcaataaattaaccatcaaatgcgactcctgtgatcgccaaaatgcctcttcagtgatccccatcctgcttatttctgagcaacctgaccctgctgatgtatctggtagtatgacagagtgattcgtttttcttgccgagtgtacgaaaacgtcttccttgccaccgactatcaaccgtcactcaaaaaaacctctctttttttcaagctatcaagaataagttgcattttatctgcaccggacaccagccatccatatatggcttttacctgctacaaagatgaagaagtgcataaatgtgatgttaaaacaatcaaagaaaaattacatgcgcaataatttcactataacattataatccatggtgaaaataacactgcacaaggattgtcatcatcaaactcatcggaactattttttctgtcgtcattggtgtaatactgattgtaagtatcctttcaggagattatttttgccgtgtggggcatggaacttgtaaagcagccaaaagcgctaggcatttaattgaaagtaaagagaaaaacagaagtagtcgcgtcaaagtctttagcacgcatattaatttgagtcatccagcggcatcctggctagcaactcaaacttgcgctaacaatatattcaatctacttcaaaacaataatgccatttatttattcgaaaacgataataaaattgaactgcgaatggggtatgattcttttttctctattgaaacgattgataaaattaacaaagaaaacatcaaagaaataaaactaaaaaatgatacaacatatgtttcccttcctaatccaaccattttaataaccacgacatcaacacctgaacgacagttttctatttctgttctggatgatgataacaaagaaaatctacctaccgataccgcaccttgttttacaattggtattcctgatgaatatactaaagccatagagttattgaacattaaataattaaatttcatattgagtttttttaaataccatatgaataattgttatatgtcattatttcctccattcactaaaactgattgattactctactccctcaccgtcatcggtagtggtatccttaacgtatattgatgaaaagacaaaacagtatgcagagggaaaaatgggttccaccagaaaggggatgctgaacgttctgattgccgccgtgttgtggggaagttcaggggtctgcgcgcaatacatcatggagcaaagccagatgtcgtcgcagtttttgactatgacgcgtttgatattcgccggtttgattctgctgacgctatcatttattcatggtgataaaatcttttctattattaacaatcacaaagatgccattagcctactgattttttccgtggttggcgcgctaaccgtacagctcacttttttgctaaccatcgaaaaatcgaacgcagccacggcaacggtgctgcaattcctctcaccgactattatcgtcgcctggttctcactggtgcgtaaatcccgcccgggcattctggttttctgcgctattttgacatcgctgatcgggacttttttattggtgacacacggtaatccgacatcattatcgatctctcctgccgcgttattctggggcattgcctcggcgtttgctgctgcattctataccacctatccctcaacgctgattgcccgctatggcacgttaccggtcgtcggctggagtatgctgattggcggtctgatcctgctgcccttttatgccagacaagggacaaactttgtcgttaacggcagtttgattctggcgtttttttatttggtggtcattggtacgtccctgacatttagtctgtacctgaaaggagcacaattaattggcggtccaaaagccagcattttaagctgtgcagaaccattaagtagcgcgctgctctctttgctgttgctgggaatcaccttcacattgccggactggctgggaacgctgctgattctgtcatcggtgattttgatttcaatggattcccgccgccgcgccagaaaaataaatcgtccggcgcggcatgagtgagaattaccagccaggcaccgcgccaccgttaaagatggtttctgccgctttagcgacttcgggtgattgataagattgcagaaattccttcacgttttctgcattcttattatcttcccgtgccaccagaatattcacatacggcgaatttttatcttcaataaatacgctgtcgttaaccggagaaagtcctgtttgctggatgtaagtggtgctgataatcgctacatccactttcgggtcgtccagtacacgtggcaactgtgccccttccagctccattatctgcaaatggcgtggattatcggttatatccaacgcggtaggtaataacccttttccttctttcagagtaattagcttctctttttgcagcagtaaaagcgcgcgaccaaggttagtcgggtcgttggggatcgccactgtcgcaccttcttttatttgcgccactgttttgatttttttggaatagcccgccatggggaagacaaacgtatttcccaccgctaccagtttataaccatgcgcctgattatcttgttcaagaaagggtcgatgctggaagacgttcgcatcaagctcgccatgatttgtcgcatcgttcggtagcaacgaaccgctaaatcctaccagttcaacatcgagaccatatttctcttttgctacctttttagcgacttccgcgacatcttgttctgcgccattaataacgccaactttaatatgcttttcatcgctgctgctctggtcgcaacctgccagcagaactcctgccagtaataatgcggcccccgcccgtagatgatgtgttgtcagtttcatttttttatccttttattaatgattacctgactatagcggtaaggtcgctgcagtttaaaaaacgaaacgctatcgataagaataaaaaggaataaaagtggaatataaagtctggcacttcttactgaccacgcaaacacctttcgtacagcatgatgagagcggcaaaagcaaactacacttatgcttcattcgatgcacatttgcagaaggttgccgctatgaagccaacgatgctactcatgattaccgtattcctgatttttccagccatttctcaggccgagtcgccattcagttctctacagtcggcaaaagagaaaaccacggtattgcaagatttacgtaaaatttgcacgccacaggcgtcattatcagatgaagcgtgggaaaagttaatgttgtcagatgaaaacaataaacaacatatacgcgaggccatcgtggcgatggaacgtaataatcagagcaattattgggaagcgttgggtaaggtagaatgcccggatatgtaagaacggcaacaaccactgaccaacgcttctttacctgatatcaggatttcttcattttcacctttgcagtcaccaacaatgcagtcagcaacatcaatgtgccggacaacatcagcggcgaagtcagaccaatgttatccaacgcataaccgccgattgccgcaccgcaggtgttagcaagctgaataacggccacctgaatagatccagccttttctgcctgatcggccaatgagcgagtgatccacgttgaccaaccaacgggaattaaagcaaaggtcagcccccagataatcgcaacaccagtagcaacaattttatagcttccccacagcgtcagtaccagcgcgctcagggcgagcacaaacggtgcgcccgctaaggccagtttcaccgaacgtttgagaataaacgacgaaagcgatgtcccgacaaagctggcgataccaaaactcagcagcaccagggttaagccatcaacaccgaatcccgccagattcatatacactgggcgaatataagtgaaaaaagcaaactgtccggcaaaggacataaagatggcgatcatcccggccatcactcccggacgttgtaataagcggaaagtattttgtttctgatgcgaaggttcacctggcagcgaaggcagtgatttgataatccagaaaatacacagcacacccatcgccgccgccgcattaaagacattgcgccaaccgataagctcgcctaaaaaactgcccaacggcgcggcaatcaccagcgcaatagaaaccgcgccgaagatcaccgacagcgccttcggcaccgtacgcggcggtaccagacgcatggtcagcgacgccgacatcgcccagaacccgcccagcgccagccccagacaggcgcgaccgattaacagcagactgaatgagttggcaaaggaaaccagcaaacaggaaagcgtcagcaaaacggcgaacagaatgacaacgtagcggcggtcagtggcctgaatggtctgggtaataaacaaactggcaaacatcgccacaaaggcggtcacggtcaccgattgcccggcaaccccttccgaaatgcctaaatcctgggccattggcgtcaacaaactgacaggcaaaaactcaacgataatcagacaggcgacgcaaaacgccaccgagaaaacggctgaccagttcggtcgggtgatggcattcgcgccgcggttttcagcaataaattcactcatggtgttacccgtggcatgtttcaggggaaaagccgaccagtctaacattgaaatgtgtgatgcatttaacgtttttgcaacttttacgatgttgcttgagctggagttaagatcgaaacggaacagggcaaagattaccggatgcggtgtgaacgtcttatccacccaccaggtcaggcgcggtctgtaggctgataagacgaagcggttttaatgcagccagtgaacgccctcggcaggctgaaagaacgcgttatagcgcatctgaaaagcattgatatcctgcatttcaggttcggtttcgcgcagaaaacccagcgccagcctgacctgagcatcagtaatcggcgcggcaaggcgggctttttgtaaaatccgatgccattgcagcaggttctgttcgctaccatcgacaatgacaatttgccagatgagcaacacctgcgcggcgttttgcaggtgcgactcatccgggcgatgcaaataacgtaaaaattcgtcaccggctgactttcccatttgatcgaccatcgactccacgggtacgacatcgatgttcagccgatcgctgagacggcgaatcgcttttctggccccggatgtcagcacccgaaaaccaaccacaaacactaccgccagcgtggcgagcattatccagatcatgagttctcctgcgtaatcagaactcatgatatctggaaaccctcgccagttactaatccaccagaataatcttcagtgcaaacagagctgcgaccaccaccacacacaggtttagatcgcgccagcgcccggtgcacactttcatgatgcagtacgacataaagcctagtgcaatcccttcggtgatcgagaacgtaaagggcatcatcaccgtggtaataaacgcaggcaccgattcggtaaaatcatcccagttaacgcgtgccaggctcgatgtcatcaatacgccaacgaagattaacgctccggcggttgcgtaaggaggaaccatcgccaccagcggtgagaagaacataaccagcaggaacataacgccaacaacaaccgcagtcagccccgtgcgaccgccgacagccacacctgaagtactttcaatataggcggtaacagacgaggtaccgataaacgcacccgccaccgaactgacgctatcaacatacagcgccttattcatattggggaatttgccgttactatctattaagccagctttatcagtcacaccaattaatgtccctgatgaatcaaataagttgatcagcataaaggagaaaatgataccggcgagttcaagtgataacgcaccgctcaaatccacttcaccaatgacgccgctaatatcaggcggaatggaatagacgccgctaaaatgaacatcaccgaaaaataatccacagcaagacgtcaccacaatagaaacaagcaccgcggcatgaaaatgacgtgatgacaacacagttataataaaaaaccctaaaatacctaacaacacgccgtgagaacttaaatcgccaatcatcaccagggtgtctttattggcgacaataacgccagtattttttaatcccattaaggcgataaataatccgattccgctggtgataccaatacgtaaacttaatggaatgttggagatcatccagtaccggatacgaaacagcgtgagcaaaaatagcccaactgcgccccagaatatcgcgcccatcccggtctgccaggagatacccatcgcccccacgaccacgaaggcaaagaaggcgttcagccccattgccggagccagtgccacgggtaagttagcaaatatccccatcgcaatactgccgataccggcaatcaaacaggtggtaacaaacaccacttttgggtccatttgtgccgcgccgaggatttgcgggttcacaaaaacgatgtacaccatggttaaaaaagtggtcatccccgcaatcaattctgtgcggacggtggtcccatgctgaggtagtttaaataatcgcgaaagcgtccctgattcattactcacgtaatcggtattgtcattattcatttttttgtccattggaggagatttaatcccttgcttttgtaaaacaaatgacaacaacggttcagtgataattatcacatttcaattgcacattaatggatattctttaataatctcgcgacgtttctttatgataaataataatcaaattgataaaatcaaaatgagaaaaatatgaataattctattaaccataaatttcatcacattagccgggctgaataccaggaattgttagccgtttcccgtggagacgctgttgccgattatattattgataatgtctctattctcgacctgatcaatggcggagaaatttccggcccaattgtgattaaaggacgttacattgccggtgttggcgcagaatacgctgatgctccggctttgcagcggattgatgcccgcggcgcaacggcggtgccagggtttattgatgctcacctgcatattgaatccagcatgatgacgccggtcacctttgaaactgctaccctgccgcgcggcctgacgaccgttatttgcgaccctcatgaaatcgtcaacgtgatgggagaagccggattcgcctggtttgcccgctgtgccgaacaggcaaggcaaaaccagtacttacaggtcagctcttgcgtacccgccctggaaggctgcgatgttaatggtgccagttttacccttgaacagatgctcgcctggcgggaccatccgcaggttaccggccttgcagaaatgatggactaccctggcataattagcgggcagaatgcgctgctcgataaactggacgcatttcgccacctgacactggacggtcactgcccgggtttgggtggtaaagaacttaacgcctatattgctgcgggtattgaaaactgccacgaaagttatcagttggaagaaggacgccggaaattgcaactcggcatgtcattgatgatccgtgaagggtccgcagcccgcaatctcaacgcgctggcaccgttgatcaacgaatttaacagcccgcaatgcatgctctgtaccgatgaccgtaacccgtgggagatcgcccatgaaggacacatcgatgccttaattcgccgcctgatcgaacaacacaatgtaccgctgcatgtggcatatcgcgtagccagctggtcgacggcgcgccattttggtctgaatcacctcggcttactggcacccggcaagcaggccgatatcgtcctgttgagcgatgcgcgtaaggtcacggtgcagcaggtactggtgaaaggcgagccgatcgatgcacaaaccttacaggcggaagagtcggcgagactggcacaatccgccccgccatatggcaataccattgatcgccagccagtttccgccagcgactttgccctgcaatttacccccggaaaacgctatcgcgttattgaggtaatccataacgaactgatcacgcactcccgctccagcgtctacagcgaaaacggttttgatcgcgatgatgtgtgctttattgccgttcttgagcgttacggacaacgactggctccggcctgtggtttgctcggcggctttggcctgaatgaaggtgcgctggctgcgacggtcagccatgacagccataatattgtggtgatcggtcgtagcgcagaagagatggcgctggcggtcaatcaggtgattcaggatggcggcgggctgtgcgtggtccgtaacggccaggtacaaagtcatctaccgttgcccattgccgggctaatgagcaccgacacggcgcagtcactggcggagcaaattgacgccctgaaagccgccgcccgtgaatgcggtccgttaccggatgagccgtttattcagatggcgtttctttccctgccagtgatccccgcgctgaaactaaccagtcaggggctgtttgatggtgagaagtttgccttcactacgctggaagtcacggaataataaaaaaaagcccggcgtcatgccgggcaaaagtcaccagttacgtttatgccactgtcaactgctgaatttttttctcgcggcggattttgcgttcttccatcaccgccactatcgccatcaggcagatacaaccaatcgcggcgatatccagcgcggcgaaggtgcctgcccagccggtaaggccaaataccggcgtcccatcggcaatcattcccagacctaacttggcaaagctgtcaccaatcaggtaagcgaaggtgcctttaataccatcggcagcgccaatcgcttttttaggtacaaagccaacagcagccacaccaatcaacaattgcgggccaaagaccaggaaacccaacgcaaagagagaagccaggtagatatattcgttgctggcgtgttgatacacaccgagcgtggcgataatcagcgccagcgcgatacaggccaccaggccacggcgaccgttcgccaggtcagagagccagccccacagcagcgtaccgaccagcgcaccagcttcaaacagcgtaaagccctgaattgccaccgctttagagagtttcagttcctggaacgcatacacggttgaccactggtcgataccaatacgcaccacatagaggaaaatgttggcaaagcacagcagccagatcactttgtttttcagcacatactcaacaaagatctgccacttggtcatatcggtagattctgtctctttatcctcttcactgatctcctcgccaaacagctcttcagctttgccgaggccataagattccggggagtcgctgccgtaacgcagaccgataaaaccaacaatcagcgcgataatcgacgggaaaataaacatgccgatgacatgaccatcgaacaggtaatttgcgccgaacagcgccacacctgctgcgcctgcaccaccaaggttgtgagaaatgttccagaaaccgaggaatgtcccgcgtttacgacgcggcgtccatttggtgatggtggagtaactgcacgaaccgccggtactctggaaaaagccgcttaaggcgtagaaggcaatcatcaggaacaggctaaccgagccgctgcccatactggcactgaagcccagcatacaaatggcagacaggatcagcatgaacggcaggaattgtttggtgtttttgccgtcggcgtagtaagaaaccagcgttttacccacgccataagtgatggagaagcccaggccgatcatccccagctgcgtcatgctcaacccgtaggtcgagatcatgtcgttctgcgcgatgttaaagttcttgcgaatcaggtacatcgtaaggtagccgataaagaccaccaggtaggattgcatgaacggtttgaaccacattttgcgccgcacttcgagcggaaggtccagggtcggcttgcgaacctggtttaagaaagccagcatgggttactcctgaaatgaatacctgcgtgaggcatgcattgtaaaaatcagcagcaaatcaggcctgagatagcgtccaggcaaaacctggaaaatttcttagttttgccggatatgaagtgaaaaggtgagatgcatcacgcttctcgcggtgtctgggcgttcaaaaagggcagtaatagcagtgcggaaatcccggcggcgatggcgataaccacaaaaaatccgctccagtgccaggtatcgagtactttcgccagcggccaaccagcaagcgacgcaccaagataagcaaacaagccgacaaatcccgtcgccgcccctgccgcctctttgtgggaacactctgccgccgccatgccgattaacatctgcgggccaaagacaaaaaaaccaatggtgaagaagcaggttgcctgcatcacgtagctggcaaatggcatcagccacagcgagccgactgaaagcaaaattccggcggcgaaaatcaaattcatcggcccgcggttgccgttaaacagtttgtccgaaccccaacccgctaccagcgcaccgataaatccgcccagttcaaacattgtcactgccgtattcgccgtgaccagatcgacgcccagcgtctcggacatatacaaattgccccagtcgttgatcgccgcccgaaccacatagaccagcacatagcaaaacgaaagcagccagatatacggattcagcaacacatatttggtgaggatctctttacgcgtcagccctgccccttcttgttgttgagcaatctccagtgcgtcgtgccgccattcaccaaccgccggtaaacctaacgcctgcggacgatcgcgcagccgccagcagagaaaaatccccacgacgatcgccatacaacccgcaatcatcatcccggcacgccagccgtaatgcagcgcgctcgctgccatcacaatgggaatgagtgcgccgccgacgttatgcgccgtgttccataatgcccaccaaccgccgcgctcggtacgagaataccaagcggttaacagacgcgcacacaccggtgaaccccagccctggaaaaaggcgttcaacacccaaagcacggcaaacgcccatagcgacgtcgagaagccaaacagaatgttgataatgcccgtggcaataagccctatccccataaaataacgggcatttgagcgatcgctgacaatgccggagacaaacttcgacacgccgtaggtaatgtaaaacagggtcgctaacaggccaatatcgctacggctgagcacgccgttagcaaggatttctggtacggcggcgttaaaacttttacgcgtgaagtaaaacagcgcgtaacccagccagatggtcagcagaatatgccgacgccagtagcgatagcgggcatcaatttcatgtttatcagtcattaatggcgcatcggcaggcgctttcagaaacggcaacatcatcgaaccttagacataacgttgaggtagagaaacgctgacacgcgtgccgtgcagacaggaaatggtcaatgtgccacccagcgccgttacgcgctcgcgcattccggtaaggccaaaaccgtgttgcccggaatctggcggtaaaccgctgccatcgtcttcaatcaccagcattaaccgctcatcatgctgccagccttgcagggtgaccgcgctggcatcagcatgtttcacaatgttgttcagcccttcctggcagacacgaaacagcgtcacgcgctggttttcgcttaacgctgattcatcgattcgccattcgagatgactgacaatgccgcgcccttccagctccatttcccgcatcagtgagcggatggcctgctccagggtgagatcatccagctggcgcggacgtaaccgccctaacaagcggcgcaccgcgtcgtaaacgcccagcgacagttgttcgatgagctgcccgctctgtttcacgctggcgttatccgccgcgagccgctggacaatgcccgcttgagttcgaatagcagtgatggtctgaccgatatcatcgtgcagctcacgtgccacatcacggcgcacgctctcttcggtttccagcaaccgttcagcgagatgctgattgcgcgccagttccttttgcagcgactggttaagttcacgcaaccgctggatgcctgcgcccagtaacaaccctgtcagactttgcaccagcagcgagagcaataaatccaccggatgatcgcgccaggtttgactggcgatcagcgcgatggcgttcatcaatgtcgcaatcagcgctccttgccaaccatagtgccaggccagcgcgataatcggcagcgccagacagaatggcgtaaagcgcgacagttcgtccggcaatcccaactggagccagaggctgataacaaacagtagcaagtaccagaccagatgccgcccacgccagttgatcggctgggaaaccagtgacgggccgagcggcagccaggtgttattggcgagatagtgccagaacaccagacatatcggggccagcgtcaggccaccagttaaagtcagcagcagcgcattccacgactctttgccgtgccaaagccagggcagcgactgcaacaacgccgccgccgttaacgccgcaccctgtaacagcaaggtgcgccagtcacgttgatggcgatagcgcgagatcagcgccacgggcaacaacgtcagtaaactaccgatcatcaataaggagaaatgggttaaaccgaccgcctgcattagccagtaaatcagcagccactccgcacccagtagcaccggccagtatccgcgcgggcattgcagcattagccctagccgcaggccaaacggaaataacagcaccgccatatcagggcgctcaaccaggtgcaggctgatactccacaggcaaaaccatgcggcagagaagataaaaaagcaggcaataacggtaattaagcgggagaacaacgtcttcatcaccaaccatcaaacatgcggcgcgccagttcaacgtcgttactgacgcccagtttttccatcagattggcgcgatggacgtgtaccgttttcggcgacaagcccagttcggcagcaatctctttcaccgccattccttgcgccagtttttccgccacctggcgttcgcgtttggttagcgggtcctggcgaccggatgccagtttaatggcaatatccggcgtcagataacagccgcccgtggcaaccgtatgcaccgcagcaatgagttcatccgggctacagcgtttggagagaaagccgcgcgcccccgcgttaagcgcctgctcaaccagcgccggactgtcatgaacggagagcataattgtcgccatgcctttcggcagctggcttagaagctccagaccggagatatcaggcatggagatatcgcaaatacacacctgcacaccgcgccccggcagccccgccagcgcctcgcgccccgaaccaaactcggcaactacctgcaaatcaggttccagccccagcagctgcgcaaagccggagcggacgataaggtgatcgtctataagggcaacggtgatcatggtcttgtcctggcgggtaataaaacgcgcttaccttaacgataagcgcgccactgttcaagccttgagcggttactgaaaaaagctgcgctcctgttgcttgtgaaaagaaatgatgccttcaaggtttggtatatcgactaatcattaaaaacgctggcagcattaataccttgttagtatccattttgaataagaaaaatatatattttatatttatagtttgattgtttgtatatttatgaattattacttcagtataaaaaccactctctaaataattcgcagacacagcacatgcaacttgaagtatgacaagcatgcctgcttcattattacactttaataataaaacccaccgattaatgtacaaaaaaatccctgcgtgatattgtctgtaaaaaaggagcagatatgcgcactcaccctcacttaataaaacaaactattgatccacgactcattaatgaaataaacaaaagaacacaaagcaacagtgagaagttatcaaacagtgataaattaacatatattaatgacaactactgtgagataacgcgaaactacacgtcattttatggtatgaacatgctgagcatcgttcttttcttacctatcgttattttatgttttgcctctgttttattctttatatatgacataacatttaacttcgaacgatacttagatacgtggagatacagagcagactctgagttaatgctacatattgcttactgcgcaatttttttcatgtcttttgtttttgctgctattctaaattattttatctttgctccgcgacattacccaatccgttttaatagaaaaacaggaaaggtctatatttgtgattatattcttaatgatatgagtcataaatcaacctatactttctggtggcactatccattctataaacataccaagcctgaatataaagagtacgactgggaacaaattcaaggtatagctttttttgcacaaaatcgccattcctcatactccactattcgctgtattgtttatgaatcattagacagtacaaatattattgacacctttaacctgataacgacagagagtgctatagatgcattgcatatgacaaatcacaaattatggttatggattaatagctttatgaattttgacgatgagtttttagagaaatctatcaatactgctccaggtatttggggccgtgaagtgaattggcctgaagatatgaataagaaatcaatgttgtcttcaatggacgaatatatactctgaataattcgagttacagaatatactcgtcatacttcaagttgcatgtgctgcgtctgcgttcgctccccccagtcacttacttatgtaagctcctggggattcactcgcttgtcgccttcctgcaactcgaattatttagagtatataagctcgcccggatgtaaatatcccatccaggcgagaaaatcacttactgaaaaaacaccgcaatcttgttaaacatcgtcggatcggactgattacgctgcactttcaccacatcttccagcttgtctatctggcttatcatctgctccagacgctggtcgtcattgaccagtagccagatgtggcttttgtcgctgtcctgaatcggcaggcagagaatgccttcaacgttaaaagcgcgacgggcaaaaaggccacaaacgtgggtcattacacccggatggttgcgaacggtgagttccagaatcacgttatcatgagttgtgttttgcatggcttattcccccaccatttcagtattcgccgcacctggcggcaccatcgggtacactttttcttcggcatcaatgcgcacatggatcagcgccgggccagggcgattgatgatttcctgcaatgcagcctgcggatcggcttcgttattcaaatcacaggtttcgaggccgaatccggcggcaatctgcataaagttgattttgcccggataggtagcggcaaaaacgccctgcttgtagaacagactctgttgctgatgcaccagccccagcgcttcgttgttcatcaaaatgattttaacatccagctgattttcactggcggtcgccatctcctgaatattcatcatcaggctgccgtcgccggagaagcacaacactttgcggtccgggttcgccagcgccgcgccaatcgccgcaggcaggccaaaacccatcgtgcccagcccgccggaggtcagccactggcgtgggcgattgagcggataggcttgcgcggtccacatctgatgctgacccacgtcggtggtgataatcgcattgtcatcgacacaggcggcaacggcgttgatcaggccgtaatggcttaatggatcgcacgctttcgggattggacacgggaattcacgctgcaaatccgccaccaactggtgccactctgcacgcggttgcgcttccaccagcgggatcaactgcgccaacacgtcatcaacatccgcctgaattgccacatgcggttgcttgattttgcccagctctgcgcggtcgatatcgacatgaataattttggcattcggacagaactgctcggttttgccaatcgcccggtcatcaaaacgcgcaccgagtacaatcagcagatccgcctcctgcaaaatatagttggtgctgcgcacaccgtgcatccccagcatacccagcgacagcggatgcgcttttggcaacatacccagcgccattaaagtcatggtggtaggcagttgcgctttctccgccagttcacgcactcgcgcaggcgcgttgatcacaccaccacccagataaagcaccgggcgtttggcggcgttaatcatcgccgccgcgtcacgaatactttcttcgctaaaggcgggtgcggcggctttttctgccatagcgggctgtgtttcaatctcaaaaactgccgtttgcacatccttaggaatgtctatccacaccgggccagggcggcctgattgcgcaatacggaaggcatcgctcatgacctgcgggagttcttcgatatgtctgaccagatagttgtgtttggtgatggggatagagatgccgtaggtgtcgacttcctggaaggcgtcggtgccgatcatcgaggcgggaacctgaccagtgatgcaaatcagcgggatggagtccagcctcgcatcggcaatggcggtcaccaggttagtcgcacccggtccgctacaggccatacagaccgccggtttaccgtcggtgcgcgccattccctgagcgataaaccccgcgccctgttcatggcgagccagaatatggcggatttgcgtgctttggcttaaggcatcgtaaacaggcaggatagaaccgcccggaatacccgtcacaatcttaatgccctgctgttccaggaaatgaacgataaattctgcgccggtaaagcgcttacgcgtcgatgttgtgcccgaacttgccatgctccagtccttttcttctgggccgactttccgggaggagcttaaacgaaaaaccccgcccggtttgcgccggcggggttttggaatcgtgtgttgttccagtccctacggcgcattgccgacgaccaccaccacacgcacgacgaccactgcggcggatggcgcagttggtagtagttttgcgttgaacatggaagtagtcattagggaccttgttggttttgtgtttaacaatatttatacaagcacagctttacaggggagacaatggaaaatttttcttccggataaaaatacgtggcagatcacattttgaactgaaactcaggcaataaagcatcatcacctgaaagacggtcagattgttgacagagtgcgccttattcatgtcgaatacagcgtaaacaccttaccctaccaaccgcaccatcactgttcccggcaacatttattgccgcttttgtttacatattctgccgctaaacaattccccattcctggcgtatatctggctaacattcatcaatgtgatagattcctctcccgcatttatgggaatgcgtagtgacttattctaattatttttataaaagcatccgtgataatgaaaaggcatagaaacgtcaatttgttattgatgttggtattactcgtggccgtcggtcagatggcgcaaaccatttatattccagctattgccgatatggcgcgcgatctcaatgtccgtgaaggggcggtgcagagcgtaatgggcgcttatctgctgacttacggtgtctcacagctgttttatggcccgatttccgaccgcgtgggtcgccgaccggtgatcctcgtcggaatgtccatttttatgctggcaacgctggtcgcggtcacgacctccagtttgacggtattgattgccgccagcgcgatgcaggggatgggcaccggcgttggcggcgtaatggcgcgtactttgccgcgcgatttatatgaacggacacagttgcgccatgctaacagcctgttaaacatggggattcttgtcagtccgttgctcgcaccgctaatcggcggtctgctggatacgatgtggaactggcgtgcctgttatctctttttgttggttctttgtgccggtgtgactttcagtatggcccgctggatgccggaaacgcgtccggtcgacgcaccgcgcacgcgcctgcttaccagttataaaacgcttttcggtaacagcggttttaactgttatttgctgatgctgattggcggtctggccggaattgccgcctttgaagcctgctccggcgtgctgatgggcgcggtgttagggctgagcagtatgacggtcagtattttgtttattctgccgattccggcggcattttttggcgcatggtttgccggacgtcccaataaacgcttctcaacgttgatgtggcagtcggttatctgttgcctgctggctggcttgctgatgtggatccccgactggtttggcgtgatgaatgtctggacgctgctcattcccgccgcgctgttctttttcggtgccgggatgctgtttccactggctaccagcggcgcgatggagccgttccccttcctggcgggcaccgctggcgcgctggtcggcggtctgcaaaacattggttccggcgtgctggcgtcgctctctgcgatgttgccgcaaaccggtcagggcagcctggggttgttgatgaccttaatgggattgttgatcgtgctgtgctggctaccgctggcgacgcggatgtcgcatcaggggcagcctgtttaagctcacgtcaccgcagcatcgtcatcagctccatgggagaacgatgctgctttatcagatcacgcatcacccgcatatgcggcgcggagtaagaataaaacgcctgatagcccgcacaaagcacgttgtctggcgtctcctcccgagcgtgcgggcacaggcgatgccagtcgcacgcctggcagccacgacgcggttgcgggttttcgctgccacaccatttttgtagggtggcgtcaaaaagctcaatcgaaatacgactgatatctgcccgtacccaacactcgaacaaggcaattaaaaatttcccccacagctctgctgtcaccgaagcggccgtcagatcgccccggtcatcaaattcaagatggggaataagctgtacggagcggataccccgttgtttgaaattgtgataaaaatcggcaggttgcagagcatccttgtactctacaaccagtttatgcctgtcctcttcagcatcaatgacctgacttcctgtcatgcgactctctcaataaatacgataagttgatgtatatgcgttacagcaaacagtattgcgagagataacaccgcgagggagatcaaaaatttgtcacggactacgtgaaattgggaaaaatcgctattcgtgacatccattaaattgcgattacgggtgtagtgccagaggatcagcgccacaatggcgagaatgccaatcgaaatccagaataacatgcccgcctggtgccagttgtgtttgatagccaacgccatcaacgcgccgtagcccagcatggtacgaaaccacgccagtgatgtacgctccggctgcagccctgggtcggcaatgcgtctggctttgcggctatccggcatacaacaccagtcccataacgatcaccgctacgaccatcaatattaagctgatgattaataagctgttggtgtagggcaggtcctctttcagacgcatcgctttttcattgcgtaaccagcgcaggtagccatacatcgctaacccgccggaaaacagacacaacaacaacgccagcagttcgcgaatgacgggcgtggcgaaatctggcgcaagttgatcaagcccaacccccgccgccagaaagcctagtgcggtacggatccacgccagaaaagtacgctcattagccagcgagaagcgataatcaggtgcttctccgaggcgggaaattttcattgttgctccttgtaaactgttcctcgccgaaaaagtaggccaggaacagcaataatgcatcagaacttctgttttttctcttccaccttcaccccttgtgtcggtaggccggtgtcatagtcgcgtaccactggcgaatagccatcttgtgggcgtggacgaaacgcccccatccagcgcggtcgtgcatctttacgccacggacgcagactccactggtaactgcggaacggatcgcgaattttatccatgtaatccaataaggcgtcatgcattttgcggcgaacgtcggcaaaacggatatcatcgatcagattatgcatttcatttaggtcattacggcgatcgtaaagttcatcactggtgaagaggttgagtaccagtttaaagtcatccgtcacccagcaacgcaccggaataaaaccgccaaagctgtcatgctcaatctcgtagcggttaaattccaccattacgccgcgtggctctttcacggcaaggatattttcccccggcagaatctctggtttttcaatatctgccagcgccatcattgtcggcagtaaatcgatatgactgactggcgtatcgacctgccgccgctccccttgcggcgaacggatgatcagcggaatacgggtgatgtcgtcatacatcgccgctcctttactgatcagcttatgtgcgcccatcatttcaccatgatcggaggtataaatgacccacgtattttcacgttgctctggcgttaaggcattgatgacccgtccgatttggtcatcaacaaagtcattgcaggcaaaatagagcggatggtgataaagcccgtcatcaccgactggcgatggcatcgcctgcgcccataagcggtgatgttccggtttgttcgccaggtcatcctctgctttctcacccagttcgtagtaaaaatcagtgtatttctctaaatactccaccggacaggtgaacgggtgatgcggctcatcatacgaaatcaccatcaggaaaggttcgtcggcgcgcgcgggctgttgcagaaaatccaccgcccgattgctgatgcggtgcgcccaggtgaaggtttcgtcaatatggttcgcctgtaaatcctcaacgctgtttaggccattgcgccacaggctaatctctttctccgtcagttcactaagatagttcgcgccatcgaaccagtaatcagcgtcccactccggcggacactcgccagtgccgaaatagtcatgtccatcgagatgccatttgccgatgtagcaggtgtgatagcccgcatccttaaagtagcgccccatggtggaaatgtttttgcccggcgcgacgttgttggtccacgggccggactggttagcgtagataccggtgaatagtccggcgcgtgcaggtgtacaaaccggtgaacaggtgtaggcagaattaaagcgaataccttctgccgccagactatcaatattttgcgtattcagcggcttaccgctatagcaaccgaccatattggtggcctgggtatcggtcatgatgaacagaaaattggggcgtttcataggctatccttcgcatcgggagtaaaggtgacggctgggtcgtgacgatgccgccagctgtcaaaaatcaggtagacaatcactacggcggcgatgaaataactgatcatcgctaaccagcgcgtaccgtagccaccgaattcagccagcccggcatagacgccaatcatcgcgaacaggataccaattgacgcaatcttgacgtttttccacggtttcatgtccaccgcaaacgcatctttgaaggtgaacggcgtggcgcgcggtttgataaaaccgatcatcagcatcacgaccacgttgatgcagaacgtacaggccagcacatagaggaaatggaagtcgaacttcaccagatagttgatggtgatgtagctgattatgccaatccccatcgccacttttgccgccagcgccggaatgcgcgggaagaaaaagcccataatgatgatggtaaccagcggcacgttgtaaataccgttgagctgtttcatccagctatacagcccctgcggcgcgttggcgatccacggcgcgaccatcaccgaaacgacggcgataaagaaaccaaatttgcgcccgacggtgaccagctgttgcggctcggcattctggttaatgatgcgccggtaaatacccatactgaataacgtactggcgctattcagaaagccgttgaaggtactgatcaccgcaccaaataacaccgcaccgaagaagcccaccagtggcaccggcagaacgttattgaccagcgtcgggtaggccatgtcggctttcggtaaatcctgatacagatgaaacgcaatcaaccctggcagcaccagtaccagcgggtcgagcattttcagcaccgccgttaacagcgcccccttttgcccttccgccaggctttttgacgccagcgtgcgttgcacgatgccctgatttgtacaccagtaaaaggtgttcaccagaatcaaaccggtaaatgccgcgccaatcggcaagggatcggtcgggccgccgactgagtttaatttctcggcgtgaacggtggtgagttgctcaatgccctgcataaagctgcccttgcccatcgcgatcaggccaaataacggcaccatcaacccgccaataaccagcccaataccgttaatggagtccgccactgccattgcgcgcagtccgccgatcaccgcatacaaaattcccgccagaccaagcaaaatcaccagtaaccagatagccgcaccatcggaaagttgtagcgactcacccacatgaaacaggctgttgagcgccaacgcgccggaatagagaacaatcggcagaaagcagacgccggtggcaatgaggaagcagaagtcgatgataatacgcgtcgttttatcataacgttcctccagaaaatcggggatggtggcaatgccgcgcttcagatagcgcggtaaaaagattagcgcgaggaagatcagcgtcactgcagaggtgacttcccagcccatcaccgacatgccacttttgtaggcctgcccggaaaggccgaccagttgttccgtggaaaggttggttagcattaacgaagcggcaataaccggcgcttttagtgaacgtccggcaagaaaatagccttgttgcgatccggtatctgttttacggaccttccaccaggtgatgaccgctaccagcagcgtaaaaccgacaaaactcaagatttgtaacgaattcatctcatagcccttatttatgtttatgtcccggacgcatgaatatagggagaggtaaaatgcgtcgggtcaggcagtcagattcttaaaatacaaacgtcatatccctgaacggattgttttctgttaagttcaggttgtgagcataattcgccggagggatattaaaatgaatggaaaattgcaaagttcggatgtaaaaaacgaaactccgtacaatattcccttattgattaacgaaaatgtgatctccagcggaatttctctgatatcgctctggcatacctacgccgacgagcattatcgggtgatctggccgcgggacaagaagaaaccgcttatcgccaactcatgggttgcggtgtataccgtacaaggatgtgggaaaattcttttaaagaatgacgaacaaataactctgcatggcaactgtattatatttttaaagccaatggatattcactcttatcactgtgaaggtttggtctgggaacagtactggatggaatttacccccaccagtatgatggatattcccgtcggtcagcaaagcgttatttataatggcgaagtttataatcaggaactcaccgaagttgctgagttaattacttcaccagaagcaataaaaaataatctggcagtcgcttttctgacgaaaattatttatcagtggatttgtcttatgcacgcagtcggtaaaaaagatccacaacggcggcaaattgaaaaattaattgccactttacatgccaatctacaacaacgctggagcgtagctgatatggctgccacgatcccctgtagcgaggcctggttgcgtcgtctgtttttacgctataccggcaagacgccgaaagaatattacctcgatgcgcgtctggatctggcgctatcgctattaaagcaacaagggaactcggttggcgaagtcgctgatacgctcaacttcttcgactcctttcatttcagcaaagcctttaagcataaatttggttatgcgccgtcagctgtgctgaagaatacggacaggtaataaccagaatggcgagtgtgtaaatgactcgatgatgttcagaaataccaggcggagtaccatttacggcgactccaccgggaaaagagttaaccgatactccagaagagcaccgccagtaattggggtgtgataatgcgcaggaacatcactaacggatagacagtggcgtaagagagcgccgccgcaccgctggttggatgaagattattagcaaacgccagcgccggaggatcggtcatggaacctgccagcatcccgcacatggtcaggtaattcattttggctaacatccgcgccagaatgccaacagtaatcagcggaacggcggtgatcagggcaccataaccaatccagcttagcccttcgccatccaccagtgtatggataaaatcgccgccggatttcaggccaaccaccgagagaaagagcacaatgcctaactcgcgtagcgccaggttagcgcttggtggcataaaccagtacagcttgccgatactgccgatacgcccgaggatcaacgccataatcagcggaccgcccgccagcccgagtttcaacgccgccgggaacccaggcacaaagacgggaatagaacctaacaatacgccaagcccgataccaataaacactggcagcatctgaacctgttgcagtttttgctgcgcattccccagcacattggcaacggcatcaattgcggacggacgccccaccaggttgaggatatcgccgaactgcaggctgatatcgctacttgcaactaattcaacaccagcacggttcaggcgcgagataacaacgtcatagcgttctttaaagtgcaggtcgcgaatacgtttaccgagcacgttttcattggtgaccaccacacgcgcgacgcgcaaatcagtgcctttcgtagacagcgaggtatcgacctcctgaccaatcaccagttgcgcattatgtaaatccgcaggctgccccaccagatgcagcaaatcgcccagttgaataacggtttctggcgaaggcacttttagggtttcttctcgtttcaatcgtgagcaaataactttatcgccattgagaatcggcacatctttaatggctaaattatgcaaattaggattctcaactcggatgttaatcgtcctgattagcgcaccgccgttggttcgcgtggactcgtgctgctgggcctcagtctcaacattgacgcggaaaataacccgcagcatccacatagtgaacaaaatgccgcaaatcccaaatggatacgccatcgcatagctcatccccatttgatcgaccatcgccatcggtgtccccaggtcgcgcaagatctgctgccctgcccccagcgctggcgtattggtgaccgcgccggaaaaaatccccagcactaccggcagtggaatatcaaacagtttatgcaggatggcggtaaccagaccaccgatgatgacgatcagaacagcaaacaggttgaggcgtaatccggagacgcgcaatgaggcaaagaagcccggccctacctgaatcccgatggtataaacgaacaggatcaggccaaactcctgaataacatgcagcatatcgctacttaatgtcatccccgcctgagaaacaaaatggccgacgatgatcccaccgaacagcacgccgccaatgcccaatccaacaccgcgaaacttgacgttgccgataaacaacccgacgaccgccaccaaagccagaatactgaccgttaatgctatatcactcatcgtccatttctcttgaaataacattttaattgctacggattatggctgaatcggtgaagcagatttgccttatagcgcacattatcacgggaaagaacgtgccgaaatatcttaaacaggcgaaatttaacgcattgctgaagaaaaaagacaaaaaaaagccccaccagaatggcggggcaaagagaatagctagttagctatttaacgcgggacgttcgctgatagcgatacgctgcgctgcgatgggttcaggctcattacgaattaaatcaatatgcagtaaaccgtttacgaaggttgcgccagagacttccatattttcagccagcgtaaagctcaggctaaaagactgattcataagcccttgatgcagccattttttctcttcttttggctgctctggcgtgccttttacgctcaggcgcgtaccttccagttgaatctctaaatcttcctgacggaaacctgccagcgcaagggtaatgcggtagtggttatcgtcgcttttctcaatgttgtacggcgggaagctctggctttcaccggcgttttgcagtgcgttggccagtttgtcaaaaccgatccattgacgcatcagtggggataaatcgaagttacgcatagtcatttctccttctaagaagcgagtaattacctgcaaatccgaagattcgcatatgctccctgacggcgagcatggaaatgtcaggccgcgccaggcggccttagggaattagttgatttcgatacggcgcggttttttcgcttccggaatcacgcgttcgagatcgatatacagcagaccattcaccaggttagcaccacgaacatgaatgttctcagctaactggaatttacgttcaaagttgcgttcagcgatgccctggtacagataggtgcgctctttttgttcgtcggcgtgagcacctttcaccaccagcagattatcctgggcggtaatttccagttcgctctcagcaaaaccagccacagcgatagcaatgcggtaatggttttcgtctaccagttcaacgttatacggagggtagccgccattactctggctctggttgttttctaagtggttaaacaaacggtcaaatccaatagcagaacggtaaagcggggataaatcaaagttacgcataatcaatagctcctgaaatcagcgagaatctaagaccttccacaatggacaggtcaggtagccagaacacccatcaggcgcgtcctcatcggctacgatgtaaaaatgggtctggaaatgaacttttcaagccttatcagcggacttttttttgcagtttatggtctattgcatagactgagggggcagcacgaaacgttaaagtgcgatagccgccacagtgcgacgtaatgatgatgttattttcagcaagggatcgctataactcatcaggccaacacccacgatcaacagatgaatttattatgataagaaatgtgttgttagcgttcatgatatgcagcggaatgacattactcggaggatgctccagcgtgatgtcccataccggggggaaagaaggaacgtatcctggcacccgcgccagcgcaaccatgattggcgacgatgaaaccaactggggcacaaaatcgctggcgatactcgacatgccatttaccgcagtactggacacaatattgctaccgtgggatgtgttccgcaaagacagctcagtgcgctcgcgcgttgaaaaaagcgaagccaacgcacaagccaccaatgcggttattccaccggccagaatgcctgataactgatttagcgatcagtttcggtgatccacaactgaccgtcctccatccacgccaaccattgaccatccggcgagaaaaccacggcgtccgcagaaggtggattggcgtggttttcggttaaatactcaacctcgccgctttgcgcatgggcacaagcaatccgattatccagcacaaagcccaaccattctcctgatggatgccagttaaatgcagactgaatatccgttttgttatgggttaactggtgcggctcgccgccctgtggcgagataagccacagttgcacaatgccgttatcatcacgcattaaaaacgcgatttgcgtaccctgcggattacagcgcacccagtggcgcgggacgttgactaaccccggataagcccgatggtgggtaaaggttaaacgtcgctgcacgacgccacgcggtggcgcgggcagggttgtttccgttccacttaacggcgcatcacctgccgctttccagccagcttcatctttcggcaactcgacaataaacagctccggcactttctcgccctttgccgaaagtgtgtcgccaataaacgccagcgcgtgatttcctacccatccttcttcataagcacgattgatttcatcactgccaggctgtggcgtgggcgtggttttacttaccagcacgcaccagtggctaccgctgtattcacgcggatgctgcttttgtacgttgaccgggccaaacggtgcagcaacaccgacatttcgcaaatccagcgccggatcgagttcatgcattacatggtcgttgtaggtaaagctcaccctttcaccgtttgggctaaagacatgtacatgactgccgccgcgcagcgctcctggcgtatatggcgcggtaatatccattgcatcgagattgctcaccttgccgctttcaacaatcactccgcgccgatgatgaaagtcgtaataccatgtttcatcaggattttccgggccgtggatgaagacatacttctctgacttcggatgaacggtcaccacgccgacgtatgcgccctgtgacgcgcgatagataacctcgacctcgccggtatggatattcacacgctcaatggtctcgccggtaaacgacgccccagaaggccgcacgtcaaacaccagccactggctgtcgggcgtccaggtattggtattggtgagcaggtgattacggggagcaaaggttatctgtttcatggcgtggtcctgatacaaaacggttcccgccatcatacttcacaaggacttcactttcagacaatagtcttttgccatcgtgatgaatgtgagtgaaaagatggaacatttcgacgtggcgattattggcctcggcccggcagggtcggcgttggcgcgaaagttagcaggcaaaatgcaggtgatcgcgctggataaaaagcaccagcatggtactgaaggtttcagcaaaccttgtggcggtctgctggcaccggacgcgcagcgatcttttattcgcgatggactgacgcttcctgtcgatgtcatcgccaacccgcagattttcagcgtcaaaaccgtcgacgtcgccgcatcgctcacgcgtaactaccagcgaagctatatcaatattaatcgccatgctttcgacttgtggatgaaatcgctgatccccgccagcgttgaggtttaccacgacagcctgtgtcgaaaaatctggcgtgaggatgataaatggcatgtcatttttcgcgcagacggctgggagcagcatattaccgcccgctatctggtcggtgccgatggtgccaactcgatggtgcggcggcatctctacccggatcatcagattcgtaaatatgtcgccatccagcagtggttcgcagagaaacatccggtgccgttctactcctgcatctttgataatgcgataactgactgttactcatggagtatcagcaaagacggttattttatctttggcggtgcctatccgatgaaagacggtcagacgcgtttcacgacgctaaaagagaaaatgagtgcctttcagttccagtttggtaaggcggtgaaaagcgaaaaatgcacggtgctgtttccctcacgctggcaggattttgtctgcggcaaggacaacgcctttctgattggcgaagcggcgggatttatcagcgccagctcgctggaggggattagctatgcgctggatagcgcagagattctgcgttcggtattactgaagcagccagagaagctcaataccgcttacaggcgcgccactcgcaaactgcgtttaaaactcttcggcaagatagtaaaaagccgatgcctgaccgcaccggctttaagaaagtggattatgcgcagtggagtggcgcatattccacagttgaaagattatccaacgcgcttcacatcgcccaccagcaggatgtaagagagcgcgccaatcaacgcgacggcggagatataaaccagtgcaggtgcgaaaccgtaaccctgcgccaggtaccccaccaccagcggaacggtgatgccgcccagaccaccggcaaagttaaacacgccgccggttaaaccaatcaggcgcatcggtgccagagaagagaccagcgaccaggtaatcgaagcaaaaccgttgccgaagaatgccagcgccatcaggcacataatcatcatcggatcgttggtgtagttcgcacccataatgcaggtggagatcagcaagccgcagataatcggcgttttacgcgcaaagcccagtgaaaagcccttacgtaccagcagatccgcgacccagccagagagcaggacgccgacaaacgccgcgaggaatggcaccgtggtcataaagcctgctttcagcgccgtgattcctttttcctgggttaaatagttcgggaaccaggttaagaaaaaccacagtgtagaagccaccgcaaattgcccaagatagacaccgatcagtttacgatggaacaccagtttccagtctttggctgttaacggctgacgtgcctcttttttcaccggcgcatcaccatccaccagaccgccaccatcacgaatgtaatccagttcagctttgctgatgcctttggtcaggcgcggcggctgataaaccttaaaccaaatcagcgaccagataatgccgataccaccggtgacaatgaacacccagtgccagctcaacatctcctgaatccagatcagcagcggagtcagaaacgccagaccgacaaactgaccagacgtataaaaaccaacggcagaagcgcgttcatgttccgggaaccagctggtcaccatccggttattggtcgggaaagcgggcgcttcgaaaataccggttatcgcgcgcagaccaattaatgacattaatcccgtggcaaagccctggaataacgtcgccactgaccagccaaatatcgcaataaaataagtcacgcgagaacctacgcgatctaaaaaccaaccgccggggatctgacatagtgtataaagccaggcgaaggccgaaaatacatagcccatttccgctttggtaataccgaactcttcctgaatatgggcggaagccacggccaggttagcgcggtcaacataacaaatgaccaccgtaataaagatcatcaccagcgtcagataacgccgacgccccggctttgctgcattaacgggaatatccatagcgagctttctccagattttgggcatagcgaagccgctcaccatgccctgtaatttacagagggttatatttttgtattgctgttttagtgcccgatgaggggcttacgtggcaggaattaccactctgctacgctgttatcttcatgacgccagagcggattacgccagtccggggcatttttactgaactcaataactttggcttcgtcgatttccacgcctaagcccggtttcgttaatggtttaaagaagccgccgaccatgctgaagtcttctttatttttcacaaagtcgagtaactccgcgcctttgttgtaatgaatgcccatactttgttcctgaagtaccgcgttataggaaacaaagtcgatatgcaggcaagccgccagtgcaatcggtccgagcggacagtgcggcgcaagggtcacgtcataggcttctgccattccggcaattttgtagcattcggtaataccgcctgcgtgggagagatccggttgcagaatcgaaataccgcctgcctccagcacacgtttaaaatcgaagcgtgagaacatgcgctcacccgccgccagtggaatatgcgtttgtgccgccagtttcgggtagtattcggcttgttccgccagcaccggctcttcaataaacagcgggcgatacggctccagttctttaatcagcactttcgccatcggcgcgctgacgcgaccgtggaaatcaagaccaaactcaatctgattgccaaaagcttcacgaatttgtgccacggtgttgaccgccgcatctaccgcgcgggagttatcaattagccccagttcttcacaaccgttcagtttgaaggtatcgaagccgatttcgcgcagggttttaatgccgtcgataacatccgccggacgatcgccgccgacccaactgtaggctttaattttgtcgcgaaccaggcctcccatcagttgccacaccggcgcattcagcactttgcctttgatatcccataacgcctggtcgataccggcgatggcgctcatcaggattggaccgccacgataaaatccggcgcgatacatcacttgccataagtcattgatgcgcgatggatcctgaccaatcaaatagtcgctcagttcgtgaactgccgcttccactgtacgggcgcggccttcgatcacgggctcgccccagccgaccacgccttcatcggtttcaattttcaggaacatccagcggggaggtaaacgatacgtggtaattttggtgattttcattgcactgcctctcgatacgccttaacaaatgctgctgcctgctgcgcggtgcgttctacggattgcccggcgcgatagagatcgctgcctaaacccgccccagcacaacctgcgtctatccactgcgccaggttttctggcgtcacgccgccaacggcaaagactgcgatgtccggtggtaataccgcttttaacgctttgatgtattgcggaccaaaagccgatgacgggaatattttcagcgcctgcgcacccgcttcgagcgcggtaaaggcttcggtcgccgtcgcgcagccggggcaaacggtcatgccgtagcccaccgcacggcggatcacttcactatggatattgggcgtaacgatgagctggcagcccatcctggcgagtgcatcgacctgttcaggtttcagtaccgtacctgcgccaatcaacgccttatcgccgtatgcatcaacgatggcgggaatgctctgctcccattgaggggaattcagcgggatttcaaccgcgtcgaacccggcgtcaatcaccgcgccaacatgcgccagcgcctcgtcgggcgtaatgccgcgcaaaatggcgatcagcgggagtttagtttgccactgcatgagcgatgctccttataccagcctgaaatgccgtgtcgcccgctaccgccgccacgtcgcaacccatcgcctgaaaggcttgctggtagcgcgcggtcagcgatgttccggcgacaagggtgatggcgtgttgatgggtcacatagtcgcgcatactggcaacctctgcgccaatcaacaaaccagagagaaattcactgacctgttcgcggggaagtgttcccagcacatgcgaggcgcgaacttcaaaaagctgcggcaatatggcgggcgcattaaggccacgctcaaggccagccgcgaaggcatcggcagcgttttcctgcggcggcaaacctgcgccaatcaatgagtgatttaacagtaaatgatgtaattcaccggtcattacggtgcgaaaatcgttgatttgctggctatcggcctgcacccatttgcaatgcgtaccgggcatgacataaagagaggaaggagccaaagcacgcgcgccgatcaattgtgtttcttcgccgcgcatcacattgtggttatcatcatgagaaacgcataatccgggaataatccagatattgtcgccaacagacgttaattgttcgccaatagatgaaaaacgggcaggaacagataaatacggtgcaactttccagccgacattgctgccgaccattcctgccattaccactggcgtattctcttcacgccagtcggtcgtcacttctgctaacaccgcagccggagattttccgttcaggcgcgtgacgcctgcttctgattgcctgctgtccaggcagtggtcgccctgataaagccaggcgcgcagattggtcgatccccagtcaattgcgatgtagcgagctgtcatgtgatttcctttaaccttcgtgtcgagctggcgatcatggtaagcgccgcctgctctgccgcatcgccgtcctgatgccttatcgcatcgaacagcgccttatgttcctggagcgtttgcggcatgttggcctcatcgcccatccaggttcgttcaaaaaccgcccgctgcagcgaactgatcgcaatgctcagttgctgtaacaccgggttatgtaccgactgcagcaccgcctcgtggtagcgaatatccgcttcgttaaacgcttcgcggtcctgattgttagcaatcatctcgttcagcgccgattcaatctgcgccagatcgctggaggtcgcgcgctctgctgcccaacgggcaatagccggctctaccaggtttcgcacttcgctcattgcactgataagccgtgggtcatagtcgttttccagcacccattgcagtacgtcagtgtcgaggtaattccactggttacgcggagccacaaacgccccgcgataacgtttcatttcaatcagccgcttcgccatcagcgaacgaaatacctcacggatgatgttgcgcgaggttgcaaactcctcacagagttctgcctcagccggaagcggcgagcctggcacgtatttgccgtgaacgatctgtttacccagcgtaataacgatgcgatcggttttattgagagtcatggagagtccttgtgctctgtatgttcttctctactttaccccgatcgatgcataacgcggcaattttgtagtaccagcgtgatgacgttcgcgtttgctgtgcgcctaatgtagtacaaacttatatagttgtactacaatttagatcacaaaaagaacaacccataagaaaatgttctacgtcgggcaaaaatctgaaaagggagatcaggcgctaaactggggggaaagaagagtatgctttcaacggcttagtactcttgtttaaaggattaatcatgaagttgaatcttaagggatttttcaaggctgccagtttgtgttctttggcatttgcgttgaccggatgtatcacctggggattggtttccaatactgcaagccgtccacatgccgagcaatggcggtcagacacgattaagggtttatcgctggcagaagatagtaacggtacgaaaggctatgtttttgttggtgaatcgttggactatctgttgaccaccggcggcgatgaggtggttaaaatgctgaacgatccggcaatccatggtgaaagaatcaccgtttctgataacgcgaaatttattttaagcagcagtaataagaatttctctggtgctattacgctctattacgactggaacaacgaagaagataaggcactggcaacacaatatggttttatttgtgatacccggcgttgtacatggatgctggacggtttgaaaggctcaatccaccagaaaaataaaaaagcggattactcaaacgtgatggttttccatcaaccctttacggtgggattttatgagtacaaagcaacagatggcgtcccgcgcggcctcgttaatgcgctgctgccagtcactcttacgctggatatagtaacgtcaccactccagttcctgattttatgcacgaccagaaattgttaatcgctgcgggcaaacgcattcatgccgtttgcccgttcactgattaattcagcacatacttctcaatagcaaatgccacgccatcttcaaggttggatttggtgacaaagttcgccacttctttcaccgaaggaatagcgttatccatcgccacaccgacgcctgcatattcaatcattgcgatgtcgttttcctgatcgccaatcgccatgatttcttccggtttaatacctaacacgtcggccagtgatttcacacccgtacctttgttaacgcgtttatcgaggatttcgaggaagtacggcgcacttttcagcacggtgtatttttctttcacttcctgcggaatacgcgcaatggcctggtcgaggatggcgggttcatcaatcatcatcactttcaggaactgggtattggggtccattttctccgcttcgcagaacaccagcggaatggtggcaacgaaagattcatgcaccgtgtagtagctgatatcacgattggcggtgtacagcgtggtgcggtccagcgcgtggaaatgagaaccgacttcgcgagagagtttttccaggaaacggtagtcgtcatagctgagagcggtttgcgccacggtgctaccatcagcggccttctgtaccagcgcgccgttataagtaatgcagtagtcgcccggctgttccatatgcagctctttcaggtaattgtgaacacctgcataagggcgacccgtcgttagcacgacattcacgccacgggcgcgagctgcggcaatcgcatttttaacggcaggtgaaatggtgtgatcgggcagcagaagggtgccatccatatcgatagcaatgagtttgatagccatgagttccccaggtagattggttcctgacccatgctaacgcgattccgctcaaaaatcagtacaacacccgagggaaaagggggatgcaacgcgcattgcgtgctccccttttgcttagcggaaaagtttccctttcagcagttccatgcctgcggaaagcagatcgttatgggcttgtggtgacacttcaccttgcggtgagagcgcatcaataatcttcggcaattgttctgccagtaaactggaagctgtactggtatccacgccaagtttttgcccgagatcggacaccgcatttgtgccgagcgccgattccagttgctcgccgctaactgattgattgctctgttgattactcagccaggttgagagaatggcccctaagccgccactttgcagtttttccaacagcacttgaatgccgccctgttcctcaacccagctcaaaatggcctgatatttccccgcatcgcctttcagaaaggcaccgacaacgtcatcaaaaagccccatgataatcacctgtaaagcgttacgtgttgacccaaaaagtatagatctgcgggatgataattgcggattgcagaaataaaaagggcggagatgatctccgcccttttcttatagcttcttgccggatgcggcgtgaacgccttatccggcctacaaaaacatgcaaattcaatatattgcaggagtctcgtaggcctgataagcgtagcgcatcaggcacgctcgcattgttaacgccattaaatatcgatattcgccgctttcagggcgttctcttcgataaacgcacggcgcggttcaacggcgtcgcccataagcgtagtgaacaactggtcggcagcaatcgcatctttaacggtaacgcgcagcatacgacggctttccgggtccatggtggtttcccacagctgttccgggttcatctcgcccagacctttataacgctggatggagaggccgcgacgggactctttcaccagccagtccagcgcctgctcgaagctggctaccggctgacgacgttcgccacgttcgataaatgcatcttcttccagcaagccacgcagtttctcacccagcgtgcagatacgacgatattcgccgccagtgataaattcgtgatccagcggatagtcagtatccacaccgtgggtacgcacgcgaacaatcggctcgaacaggttttgttcggcattggtatggacatcaaacttccactggctgccgtgctgttctttgtcgttcagttcgctgaccagcgcgttcacccagcgggtaacggtctgctcatcagagagatcggcttccgtcagcgtcggctgatagataagctctttcagcattgctttcggataacgacgctccatgcggttgatcattttctgcgtcgcgttgtactcagacaccagtttctctaacgcttcgccagccagcgccggtgcactggcgttggtgtgcagcgttgcgccatccagcgcgatagagatctggtactgatccatcgcttcgtcgtctttaatgtactgttcctgcttacctttcttcactttgtacagcggcggctgagcgatgtagacgtgaccacgttcaacgatttccggcatctgacgatagaagaaggtcaacagcagcgtacgaatgtgcgagccgtcgacgtccgcatcggtcatgatgatgatgctgtgataacgcagtttgtccgggttgtactcgtcacgaccgataccacaaccaagcgcggtgataagcgtcgccacttcctgagaagagagcatcttatcgaagcgcgctttctcgacgttgaggattttacccttcagcggcagaatcgcctggttcttgcggttacgcccctgcttcgcagagccgcccgcggagtccccttccacaaggtacagttcggaaagcgccggatcgcgttcctggcagtctgccagtttgcccggcaggccagctaaatccagcgcacctttacggcgggtcatttcacgcgcgcgacgcgcagcttcacgggcacgggcagcatcgataattttgccgaccacgattttcgcgtcggttgggttttccagcaggtattccgccagcagttcgttcatctgctgttcaaccgccgatttcacctcagaagaaaccagtttgtctttggtctgtgaggagaatttcgggtccggcactttcacggaaacgaccgcaatcaggccttcacgcgcatcgtcaccggtggcgctgactttggcttttttgctgtagccttctttgtccatgtaggcgttcagggtgcgggtcatcgccgcacggaagcctgccaggtgagtaccgccgtcacgctgcggaatgttgttggtaaagcagtagatgttttcctggaagccatcgttccactgcaacgccacttcgacgccaataccgtctttttcggtggagaagtagaagatattcgggtggatcggcgttttgttcttgttcagatattcaacgaatgccttgatgccgccttcatagtggaagtggtcttctttgccatcgcgcttgtcgcgcagacgaatggaaacgccggagttgaggaacgacaactcacgcagacgtttcgccagaatgtcatattcgaactcggtcacattggtgaaggtttcaaggcttggccagaaacgcaccatagtgccggttttttcagtctcgccggtaaccgccagcggggcctgcggtacaccgtgttcgtagatctgacggtgaattttaccctcgcgctggataaccagctccagtttttgcgacagggcgtttactaccgaaacaccaacgccgtgcagaccgccggacactttataggagttatcgtcaaatttaccgcctgcgtgcagaacggtcatgatcacttccgccgccgatacgccctcttccgggtgaataccggtcggaatgccgcgcccgtcatcctgtacagagacagagttatcggcgtgaatggtgacgataatttctttacagtgacccgcgagcgcttcgtcgatagcgttatctaccacctcgaataccatgtggtgcagaccggtgccgtcatccgtgtcgccgatatacatacccgggcgcttacgcaccgcatccagccctttcaggactttgatactggaggagtcataagaattcgacatcaacgtttctcgctcatttatacttgggttaatccgttattttacccttttccacggtaaacatcttcgaattttcgtccgacatgtctataacgtgttcagcactgatcgcgctgacaaagacctgtgattgcgtcgcttttaagcggctggcaagcagcccgcgacgctcatcatcaagctcagaggcaaaatcatctatcaggtagagacaccgccgcccgctttcacgggtgaggaactctccttgcgccagacgtaaggcgcacatcaacagcttaagctgcccacgcgataaggtatcttccaccggcgcaccgtcggcgcgaatgcgtaagtccgctttatgcgggccgtgcgcggtgtaggttagctggcgatcgcgttcaaaattacgttccagcacctcagcgtactctgtctctttctcccagccgcgctggaaagagaaagtcagagaaaactcagggagaaattgcttacaggtatcagccatatcggctgcgataccggcgctatactccgcgcgccaggtgctgatttgctccgccagcgggatcagttctttatcccacgggcgtagctgttcgtaacgagtcacctggcgcagcgccgcattgcgctgcttgagcaatcgcttgagattgctccaggcggtgaaaaatccgggttcgttgtgaaagcatccccagtcgaggaatgctcttctgtatttggggccgccgttgagtaaagtaaacccttctggcgttatcagctgcattggcatcaggtgcgccagctccgcgactttatgcccgtctgtaccgtcaatacggactttgctgtcgccttgtttgtctttggttaaaccaatcgccgtctcgcgctcttcgccctgtaatcgcccgtggagaacaaacgcctcctgctcgtggcgaatgacgcgaccaatctgcaaactgcgaaacgcccgaccgtggccgagcgtatagatggcttccagcacgctggttttgccactgccgttggcacctaccagaaagttaaagccgggagataaggcgagatccgcggtttcaatgttgcggaaatcgcggatcaacaagcgggtgagggacattacagtctcattggcatgacaacataagccgcgctctggctggccgcatcttcaatctgcacgctggaaaccgaatcggtcagcatcatgcggacgttttcgcatttcagtgcgttcagaacatccagcacatagctgacgttgaagccgatttccatctccgcaccgctataggtaacgtcgaggatctcttccgcttcttcctgttctgggttgttggcggtgattttcagctggttttcgctgacatacagacgcacgccgcggaatttctcgttagagagaattgccgcacgggcaaacgcctgcttgagcagatcacagccagcttccagatgcttgtccgggttcttcggcagaacgcgacggtaatccgggaagcgaccatccaccagtttcgaggtgaagataaagtcgccaacgtgggcgcgaatgttgttgctgccaatctgcacgcgcagcggattgtcgccgccgtcgagcatacgcatcagttcaatcacgcctttacgcggcacgatcaccgaatggcttggcaaagattgaccaattggcattgaacagactgccagacggtggccgtcggtcgccacggtgcgcagttcttcaccttcggtttcaaacagcataccgtttaagtaatagcgaacgtcctgatgcgccatagaaaactgggtcgcttcaatcagacgcttcatcgtcgcctgcggcagggtaaattcgacttcgctctgccagtcatcgaggttcgggaaatctgccgctggcagggtagacagcgaaaaacggctacgcccggagcgcaccagcatccgctcaccttccagctgcacggcaatttccgcgccttcaggcagaccacggcagatatcaaagaatttgcgcgccggaacggtcgtcgcccctggttcgtgcggctgaaccagcgcaacgcgtgccaccatttccatctcgagatcagtaccggtcagcgacaacgtaccgtcagcaacctgtaacagcagattaccgagaatcggtagcgtaggacgaccacctaacggaccgctcacctgttgtagcggttttaataaatgctcacgttctacggtaaatttcataggtttacgatgacaatgttctgattaaattagaaaaatcttctttgatatcgtggctctcttcacgcaactgctcgatcttccggcaggcatgaagcaccgtcgtgtggtcacgaccaccaaaggcatcgccaatctccggaagactgtggttagtcagctctttcgccagcgccatcgccatctggcgcggacgggccaccgagcgggatcgacgcttggaaaggagatccgcgactttgatcttgtagtactccgccaccgtcttctgaatattgtcgatggtgaccagtttttcctgcaatgccagcaagtcacgcagcgcctcacgcacgaagtcgatggtgatcgcccgtccggtaaagttggcgttggcaatgacgcggttcagcgcgccttccaactcacgtacgttagatcgtagacgcttggcgataaagaacgccacttcgcccggcaaacgaatgtcgttttcgtcggcctttttcatcaggatcgccacgcgggtttccagctctggcggttcgatcgccacagtcagtccccagccgaagcgggatttcaaacgatcctcaacgccgttgatctctttcggatagcgatcggaggtgagaatgatctgttgattaccttccagcagggcgttgaaggtgtggaaaaactcttcctgagatcgttctttattagcaaaaaactgaatatcgtcgatcagcagtgcatctacggaacggtagtagcgtttaaactcttcgatcgcgttgttttgcagggctttaaccatgtcctgaacaaagcgctcggagtgcatataaaccactttggcattcggcttgcgcgccataatgccgttacccaccgcatgcagcaggtgagttttacccaaacccgtgccgccataaaggaacaacgggttataagcaccgccagggttatctgccacctggcgagccgccgcgcgcgccagttggttagatttaccttcaacgaagttatcaaacgtgtgtttgacgtttacgttagaacgataggtcggttctgccggagccgggacgttatcccaacccgagcgcgtagaaggcgcagcacgttgcggctgcgtttgcgccacctgtgcaggggccgcgacgttgctcgtcactgccgcttgtggcgtttgcgtcaccggtttggtgccgacttcaaaacgcagctgtggggcatccgctccgcagaaactggttagcagtccattgatattattaaggtacttgtcccgtacccaatcgaggacaaaacggtttggcgcgtacagggccagcgtgttatcgctcagttccgcctgcaatgggcgtatccacatactgaattctgtggctggtaactcatcctgcaatcgggcaagacactgctgccaaagcgaaagtgacacggcggactccactcgaacaaaagtcgataatgactaaggctgaaacattcatgattgttgacgtacgtcgaaaagaccctgcatgagggtgacgcacgaaccgctgtctgcggttatatgcccgatcaagatcctgcaaaacgatcgggaccgcggatcatagcctaaactgcgcaatagatcttctgtttctcacagattttcccgatttatccacaggatgatccagaactcgctaagtgtaaacgatcctgccgcgggccgggcacgatttacgccgcatattggaaaatttaatgaccatagacaaaaattggcttaatcgatctaataaagatccagaacgatccttgcgctttacccgtcagcccgtataatcctccacccggcgcgccatgctggttttcactggtgtgaggccgtacgttttccccgcgaaaaggtgcggaaaagcgcggtaaataaggaaagagaattgactccggagtgtacaattattacaatccggcctctttaatcacccatggcttcggtgtccatcgtttcatttttcggcggatatccaataaagccattgaatttattcaagtttaggtagaaatcgccatgaaacgcacttttcaaccgtctgtactgaagcgcaaccgttctcacggcttccgtgctcgtatggctactaaaaatggtcgtcaggttctggcacgtcgtcgtgctaaaggccgcgctcgtctgaccgtttctaagtaataaagctaacccctgagtggttaagctcgcatttcccagggagttacgcttgttaactcccagtcaattcacattcgtcttccagcagccacaacgggctggcacgccgcaaattaccattctcggccgcctgaattcgctggggcatccccgtatcggtcttacagtcgccaagaaaaacgttcgacgcgcccatgaacgcaatcggattaaacgtctgacgcgtgaaagcttccgtctgcgccaacatgaactcccggctatggatttcgtggtggtggcgaaaaaaggggttgccgacctcgataaccgtgctctctcggaagcgttggaaaaattatggcgccgccactgtcgcctggctcgcgggtcctgatagccctcattcgggtctatcaacgcctgattagtccgctactcgggccgcattgtcgtttcactccaacctgttcaagctacggaattgaggcattgcgcaggtttggagtgataaaaggcagttggttgacggtgaaacgcgtattaaaatgccaccctttacaccctggtggtgacgatcccgtcccgcccggaccatttgataccagagaacactaacgatggattcgcaacgcaatcttttagtcatcgctttgctgttcgtgtctttcatgatctggcaagcctgggagcaggataaaaacccgcaacctcaggcccaacagaccacgcagacaacgaccaccgcagcgggtagcgccgccgaccagggcgtaccggccagtggccaggggaaactgatctcggttaagaccgacgtgcttgatctgaccatcaacacccgtggtggtgatgttgagcaagccctgctgcctgcttacccgaaagagctgaactctacccagccgttccagctgctggaaacttcaccgcagtttatttatcaggcacagagcggtctgaccggtcgtgatggcccggataacccggctaacggcccgcgtccgctgtataacgttgaaaaagacgcttatgtgctggctgaaggtcaaaacgaactgcaggtgccgatgacgtataccgacgcggcaggcaacacgtttaccaaaacgtttgtcctgaaacgtggtgattacgctgtcaacgtcaactacaacgtgcagaacgctggcgagaaaccgctggaaatctccacctttggtcagttgaagcaatccatcactctgccaccgcatctcgataccggaagcagcaacttcgcactgcacaccttccgtggtgcggcgtactccacgcctgacgagaagtacgagaaatacaagttcgataccattgccgataacgaaaacctgaacatctcttcgaaaggtggttgggtggcgatgctgcaacagtatttcgcgacggcgtggatcccgcataacgacggtaccaataacttctataccgctaatctgggtaacggcatcgccgctatcggctacaagtctcagccggtactggttcagcctggtcagactggcgcgatgaacagcaccctgtgggttggcccggaaatccaggacaaaatggcagctgttgctccgcacctggatctgaccgttgattacggttggttgtggttcatctctcagccgctgttcaaactgctgaaatggatccatagctttgtgggtaactggggcttctccattatcatcatcacctttatcgttcgtggcatcatgtacccgctgaccaaagcgcagtacacctccatggcgaagatgcgtatgctgcagccgaagattcaggcaatgcgtgagcgtctgggcgatgacaaacagcgcatcagccaggaaatgatggcgctgtacaaagctgagaaggttaacccgctgggcggctgcttcccgctgctgatccagatgccaatcttcctggcgttgtactacatgctgatgggttccgttgaactgcgtcaggcaccgtttgcactgtggatccacgacctgtctgcacaggacccgtactacatcctgccgatcctgatgggcgtaacgatgttcttcattcagaagatgtcgccgaccactgtgaccgacccgatgcagcagaagatcatgacctttatgccggtcatcttcactgtgttcttcctgtggttcccgtcaggtctggtgctgtactatatcgtcagcaacctggtaaccattattcagcagcagctgatttaccgtggtctggaaaaacgtggcctgcatagccgcgagaagaaaaaatcctgattcggtgagttttcgctaaaataagggcggtcagttgaccgccttttttcttttcgtagggcggataagcaccgcacatccgccacacaaagcaacaggaacatcatgagcgataatgacactatcgtagcccaggccacgcctccgggacgtggcggcgttggcatcctgcgcatctccggcctcaaagcccgtgaagttgccgaaaccgtgctgggtaaactgcctaagccacgctacgccgattatcttccgtttaaagacgccgatggcagcgtgctcgatcaggggattgcgctatggttccctggcccgaactcgttcaccggcgaagatgtgctggaactgcaaggtcatggcggtccggtgatcctcgacctgctgttaaaacgcattctgaccattcccggcctgcggattgcccgccctggtgagttttccgaacgcgcatttctgaacgataaactcgacttagcccaggccgaggcgattgcggaccttatcgacgccagctcggaacaggcggcccgttcggcgctaaactcgctgcaaggcgcgttctccgcacgggtcaaccatctggtggaagccctcacccacttgcgcatttacgtcgaagcggcaattgatttcccggatgaagagatcgatttcctctccgacggcaaaattgaagcccagctcaataacgtaattgccgatctcgacgcggtacgcgccgaagctcgtcagggtagtttgttgcgcgaagggatgaaagtggtgattgccggacgtcctaacgccggtaaatcgagcctgctgaacgcgctggcgggccgtgaagcagcaatcgtaaccgatatcgccggaaccacgcgtgacgtgctgcgtgagcatatccacattgacggaatgccgttgcatatcatcgataccgccgggcttcgtgaagccagtgacgaagttgaacgtattggtatcgagcgcgcatggcaggaaattgaacaggcagaccgcgtgctgtttatggtcgatggcaccacgacagacgccgttgatccggcagagatctggccggaatttatcgcccgtctgccagcgaaactgccgatcaccgtggtgcgcaataaagccgatatcaccggcgaaacgttggggatgagcgaagtgaacggtcatgcgttaattcgtctttcggcgcggactggcgaaggcgtggatgtactgcgtaaccatctcaaacagagcatgggctttgacaccaatatggaaggcggcttcctggcgcgtcgtcgtcacctacaggcgctggaacaggcggcagagcatttgcagcaaggtaaagcgcaactgttaggtgcctgggcgggtgaactgctggcggaagagttgcgcctggcacagcagaacttaagcgagatcaccggggaatttacttcagacgacctactggggcggattttctccagtttctgtatcggtaagtaaccgcgcttgcgaagccgcattctgactgtcagatgcggcttcgcttcattgttagcactcctgttattcctcaacccttttttaaacattaaaattcttacgtaatttataatctttaaaaaagatatttaatattgcgtcccgaacgattgtgattcgattcacatttaaacaatttcagaatagacaaattccttgagtattatactgtagcctcgtgtctttcgaggataagtgcattatgaatatcttacatatatgtgtgacctcaaaatggtttaatattgacaacaagattgtcgatcaccgcccttgatttgcccttctgtagccatcaccagagccaaaccgattagattcaatgtgatctatttgtttgctatattttaattttgccttttacaaaggccatctctcgtttatttacttgttttagtaaatgatggtgcttgcatatatatctggcgaattaatagatattgcaaatgtaatattcacagggatcactgtaattaaaataaatgaaggattatgtaatggaaaactttaaacatctccctgaaccgttccgcattcgtgttattgagccagtaaaacgtaccactcgcgcttatcgtgaagaggcaattattaaatccggcatgaacccgttcctgctggatagcgaagatgtgtttatcgatttactgaccgacagcggcaccggggcggtgacgcagagtatgcaggccgcgatgatgcgcggcgacgaagcttacagcggcagccgcagctactacgcgttagccgagtcagtgaaaaatatctttggttatcaatacactattccgactcaccagggccgtggtgcagagcaaatctatattccggtactgattaaaaaacgcgagcaggaaaaaggcctggatcgcagcaaaatggtggcgttctctaactatttctttgataccacgcagggccatagccagattaacggctgtaccgtgcgtaacgtctatatcaaagaagccttcgatactggcgtgcgttacgactttaaaggcaactttgaccttgagggattagaacgcggtattgaagaagttggcccgaataacgtgccgtatatcgttgcaaccatcaccagtaactccgcaggtggtcagccggtttcactggcaaacttaaaagtgatgtacagcatcgcgaagaaatacgatattccggtggtcatggactccgcacgctttgccgaaaacgcctatttcatcaagcagcgtgaagcagaatacaaagactggaccatcgagcagatcacccgcgaaacctacaaatatgccgatatgctggcgatgtccgccaagaaagatgcgatggtgccgatgggcggcctgctgtgcatgaaagacgacagcttctttgatgtgtataccgaatgcagaaccctttgcgtggtgcaggaaggcttcccgacatatggcggcctggaaggcggcgctatggagcgtctggcggtaggtctgtatgacggcatgaatctggactggctggcttatcgtatcgcacaggtgcagtatctggtcgatggtctggaagagattggcgttgtctgtcagcaggcgggcggtcacgcggcattcgttgatgcaggtaaactgttgccgcatatcccggcagatcagttcccggcacaggcgctggcctgcgagctgtataaagtcgccggtatccgtgcggtagaaattggctctttcctgttaggccgcgatccgaaaaccggtaaacaactgccatgcccggctgaactgctgcgtttaaccattccgcgcgcaacatatactcaaacacatatggacttcattattgaagcctttaaacatgtgaaagagaacgcggcgaatattaaagggttaacctttacctacgaaccgaaagtattgcgtcacttcaccgcaaaactgaaagaagtttaattaaaacactcagagtggctataaggatgttagccactctattaccctacatcctcaataacaaaaatagccttcctctaaaggtggcatcatgactgatcaatcagaaaaaaaacactctgcattttggggtgttatggttatagccggtacagtaattggcggtgggatgtttgctttacctgttgaccttgccggagcctggtttttttggggcgcttttattcttattatcgcctggttttcaatgttacattcagggctattattattagaagcaaacttaaattatcccgtcggttccagttttaacaccatcaccaaagatttaatcggtaacacctggaacattatcagcggtattaccgttgccttcgttctctatatcctcacttatgcctatatctctgctaatggtgcgatcattagtgaaacgatatcaatgaatttgggctatcacgctaatccacgtattgtcgggatctgcactgccattttcgttgccagcgtattgtggataagttcgttagccgccagtcgtattacctcattgttccttgggctgaagattatctcctttgtaattgtttttggttctttcttcttccaggtcgattactccattctgcgcgattccaccagcaccactgcggggacgtcttacttcccgtatatctttatggctttgccggtgtgtctggcgtcatttggtttccacggcaatattcccagcctgattatttgctatggaaaacgcaaagataagctcatcaaaagcgtggtcttcggttcgctgctggcgctggtaatttatctcttctggctctattgcacgatggggaatatcccgcgagaaagctttaaggcgataatctcctcaggcggcaacgttgattcgctggtgaaatcgttcctcggcaccaaacagcacgggattatcgagttttgcctgctggtgttctccaacttagctgttgccagttcgttctttggtgtcacgctggggttgttcgattatctggcggatctgtttaagattgataactcccacggcgggcgtttcaaaaccgtgctgttaaccttcctgccacctgctttgttgtatctgatcttcccgaacggcttcatttacgggatcggcggtgccggactgtgcgccaccatctgggcggtaataattcctgctgtactggcaatcaaagcccgcaagaagtttcccaatcagatgttcacggtctggggcggcaatcttattccggcgattgtcattctctttggcataaccgtaattttatgctggttcggtaacgtctttaacgtgttacctaaatttggctaaatccttcaggaagccagccattcgctggcttcttgcctgtcaggaaatcacttatgtccaaatggcaactcgcctgattctccttcaccacgtatgctttgcgtcaccttactatcaggacgctttagcccatgtcccgctttttgatttgtagttttgccctggttttactttatcccgcagggattgatatgtacctcgttggtttaccgcgcatcgccgccgatctcaatgccagcgaagcgcagttgcatattgcgttctccgtttatctggcggggatggcggctgcgatgttatttgccggtaaagtggccgatcgttcagggagaaagcctgtcgccatacccggcgcggcgctatttattatcgcctcggtgttctgttcactggctgaaaccagcgcgttatttcttgcagggcgatttctacagggactgggcgcgggctgttgttacgtagtggcgtttgccattttgcgcgacacgctggatgatcgacgtcgggctaaagtgctgtcgttactcaacggcattacctgcatcattccggtgttagcgccagtgctcggacatctgattatgcttaacttcccatggcagagtctgttctggacgatggcaataatgggtgtcgcggtactgatgttgtctttgtttattttaaaagaaacgcgccctgcggcccccgcagcttcggacaaaccacgagaaaatagcgagtcactgcttaaccggtttttcctcagccgtgttgttatcaccaccctcagcgtttcggtgatcctcaccttcgtcaacacgtcgccagtattgctgatggaaatcatgggttttgagcgcggagaatacgccaccattatggcgttgaccgctggcgtcagcatgaccgtttcattctccacgccgtttgcgctgggaatttttaagccacgtacgttgatgatcacctcacaggtgttattcctggcggcggggatcacccttgccgtttcaccttcccatgcggtttcgctgtttggtatcacgctgatttgcgccggtttctcggtaggttttggtgtggcgatgagtcaggcgttagggccgttttcattacgcgcgggcgtagccagctcgaccttaggtattgcgcaagtttgcggttcgtcactgtggatttggctggcggcggtggttggtatcggcgcatggaatatgctgatcgggattctgattgcctgtagcatagtaagcctgttgctgattatgttcgtcgcgcctggacgcccggttgccgctcatgaagaaatccatcaccacgcttgatctcaatctgctgctctgtctgcaactgctgatgcaggagcgcagcgtgaccaaagcggcgaagcggatgaacgtgaccccttcggcggtgagtaagtcgctggcaaagttaagagcgtggtttgacgacccgctctttgtgaactcaccgctggggctgtcgcccacaccgctaatggtcagcatggagcaaaatctggcggagtggatgcaaatgagcaacctgctgctggataaaccgcaccaccagacaccgcgcggcctgaagtttgagctggcagcagaatcaccgctaatgatgatcatgcttaatgcgctgtcgaaacggatctaccaacgttacccgcaggcgaccatcaaattacgtaactgggattacgattccttagatgccattactcgtggtgaagtggatattggtttttccggtcgcgaaagtcatccccgttcgcgggagctgttaagctcgctaccgttagccattgattatgaagtgctgtttagtgatgtgccctgcgtctggttacgcaaagatcatccggcactgcatgaagcatggaatctggacacctttttacgttatccgcatatcagcatttgctgggaacagagcgatacctgggcgctggacaatgtgttacaggagctggggcgcgaacgcacgattgctatgagcctgccggaattcgagcagtcactgtttatggcagcacagcccgacaatctgctactggcgaccgcgccgcgctactgccagtactacaatcaactccaccaactgccgttggttgctcttcctctcccgtttgatgaaagccagcaaaaaaagctggaagtcccttttacccttctgtggcataaacggaacagccgtaatccgaagatcgtctggttacgggaaaccattaaaaatctttacgcgtcgatggcataaccgaatcgtatgaaacgcgacccaatttcacaatgaaatgtaaaaaagttgtaataaacttatctgaatcgaacttttagccgctttagtctgtccatcattccagtaaatgattactcttgtattcataatggaccattaagcatggagcgaaaaatggcgactcactttgcccgagggattttaacggaaggacatctgatttctgttcgtctcccctcccagtgtcatcaagaagcccgaaacattccccctcatcgtcaaagccgttttctggcgtccagaggtttactcgcagaactgatgttcatgctgtatggcattggcgaattgccggaaatcgtcaccctgccgaaaggaaaaccggttttcagcgataaaaatttgccttcgttttctatttcctatgccggaaatatggtcggcgtggcgttaacaaccgaaggtgaatgtggcctcgatatggaactacagcgtgcgacacgcgggtttcatagcccacacgcgcccgataaccacaccttttccagcaatgaatcgctatggatcagtaaacaaaacgatcctaacgaagcgcgggcgcagctcatcacgctgcgccgaagcgtgctaaaactaaccggtgatgttttgaatgacgatccgcgcgatctgcaactactgcccattgccggacgcctgaaatgtgctcatgtaaatcatgtagaagcgttatgcgacgcggaggacgtgctggtgtggtccgtggcggtcacgcccacgattgaaaagctcagtgtctgggagttagatggcaaacacggctggaaaagcctgcccgatattcacagccgcgccaacaatcctaccagccggatgatgcgttttgcccagctctctaccgtgaaggctttttcgccaaattgatagacaaccacaggagtcatcatgtctgaaaaattgcaggtggttacgttactggggagcctgcgcaaaggctcatttaatggcatggttgcacgtaccctgccgaaaattgctccggcgagcatggaagtcaatgcgttaccttccattgccgacattcccctgtatgacgctgacgtacagcaggaagacggttttccagcaacagttgaagctctggcggaacagatccgtcaggctgacggtgtggtaatcgtcacgccggaatataactactcggtaccgggtgggctgaaaaatgccatcgactggctttcccgcctgccggatcaaccgctggcaggtaaaccggtattgattcagaccagctcaatgggcgtgattggcggcgcgcgctgtcagtatcacctgcgccagattctggttttcctcgatgcaatggtgatgaacaagccagaatttatgggcggcgtgattcagaacaaagttgatccgcaaaccggggaagtgattgatcagagtacgctggaccacctgaccgggcaattgaccgcatttggtgagtttattcagcgagttaagatctaaataaaaaacccgccagcaatcatgcatggcgggtttttaacgcgctatcgattttagtgagcgtcgataaagacaatcttcaggataaacagcagcgcaacgatgattacgcacgggctaaggtcacgcagacgtccggtaccaatcttcatcacgcagtaggagataaagcccagcgcgataccttcagtaatcgagaagctgaacggcatcatcacagcggtaataaacgccggaacagattcagtaagatcctgccagttcacgcgagcaagacttgaggtcatcaacacgccaacgtaaatcagcgcaccagctgcagcgtagcctggcaccatccccgccaacggcgacaggaagataaccagcaggaacagcaaaccaacaaccactgccgtcagaccggtacgaccgccaacggaaacgccggaagaagattcaatatacgccgtaacagaagaagtaccgataaacgaaccggtcaccgaagagatactgtcgacatacagcgcctgcttcatgcgcgggaatttacctttctcatcagccagacctgctttatcggtcacgccaatcagcgtaccggaggagtcaaacaagttgaccagcatgaaagagaaaatcacccctgccagcccaaggttaaacgacccggctaaatctacatgacccacgacactcattacactcggcggcgcagaaacgatgccattatagtggacatcacccagcatccagcccagcagcgttgtcaccacgatggaaaccagcaccgccgcgtgaatattgcgcgaggccagaatggcgatgatgaagaagccgaggatccccagcagcacgctgtgagaagtcagattaccgatgctcaccagcgtttccgggttagcgacaatcacacctgcgtttttcagccccatcatgccaataaacagaccgataccactggtgatgccaacacgtagacttaccgggatgttggctatcatccagtagcgaacgcggaaaatcgtcagtaacagcagaccaatcgcaccccagaagattgcgcccatcccgacttgccacggcaagcccatcgcctgtacaacgacaaaagcgaagaacgcattcaggcccattgccggtgccagtgcaactggcaggttagcaaacagccccatcataatactgccgaatgcagcaatcagacaggtcgtgacgaagacggcgctggtatccatgccagcaacgccaagaatttgcgggttaacaaaaacgatgtaaaccatcgtcaggaaggtggtaaaaccggcgatcacttcggtccgtgccgtcgtgccatgttcgcgcagtttaaacacgcgttccagcatcccctggccagaagcctgggttgtgtgttgttgactcattatctatttccgaacaaggagggaaaatccgtcgctatcgtataccaaaatgagacaatatggacggctgaagataactttttttcattgtatttgcttatacggcaacgattgcgtcatgcgaattggcatgacgaaaacgttaaactaacgataaaggaaagacatgtcccagatagaagcggtatttttcgactgcgacggtacgctggtcgatagcgaggtcatttgctctcgcgcctatgtcacgatgttcagggaatttggcattcacgttgacctggaagagatttttacccgttttaaaggcgtaaaactctacgaaatcatcgacatcatcagtaaagaacagggcgtgacgatggtccaggccgatgccgagcacgtttaccgcgcagaagtagcacgtctgtttgataccgaacttgaggacatcgcaggagcgaacgaattgctggcaagcattaacgtgccgatgtgcgtcgtctctaacggtccggtcagcaaaatgcagcattcgcttggtaagctcaacatgctgcactacttcccggaaaaactgttcagcggctatgatatccagcgttggaagcccgatccggcattaatgttccatgcggcaaaagcgatgaatgtgaacgttgaaaactgcattctggtcgatgactccagcgccggtgcgcaatcagggatagatgccggaatggaagtgttttacttctgcgctgacccgcacaataaaccgatcgttcacccgaaagtcaccacctttacccatctttcgcaattaccggaactgtggaaggcgcgtggttgggatattacggcatagttattcacactcccttcacttactccacttaaattggcacgcaaaggtaagtaaagggagtttgatatgtctgtttcacgtcgggtaattcatcacggactgtattttgcggttttagggccgttaattggtgttctgtttcttgtcctctacatattcttcgcaaaagaaccgctgattcttttggtaataatacaggtacttccattgtttatcttattgtcgataactacgggagctattcctgcaatgttaactggcgtaatggtcgcctgtctgccggaaaagatcgggtcacagaaacgttatcgttgtctggttggcggcataggtggagtcgttatcaccgagatctattgcgctgttatcgtacatattaaggacatggcttcctcagcgttatttgaaaacattctttctggtgaaaatctcgttgtccgcatcatcccagcattgctggcaggcgtggtgatgagcagaatcattacacatctacccggattggatatttcatgtcctgaaacagactctttaagctaagcggaatgctttatctatttgtcattaaatgttggagaacaggccggagcgtaattcacacatccggccttatttttaatcttaaccgagcgctaattctgcggcagcggctttatcagcgattaccatcagcgaaggatgcagctgcaacacggaagcaggaacatcttcggtaaccgggccttgcagaacatttttcagtgcctgcgctttacctgcgccactgacaattatcagcaagtttttcgccgccatgatgcttttcggccccatcgtcacgtagctgtcaggcactaatgaaaagtcgccgcccaactcgccatgcgccacaatatcaaccatctctccctggatcgggaactccacggtttgctcatggaaatgggtcgtatttggcagattgccacaaaaatgaccatctacacctaatcccaacaccaccaaatccaggccgccttcacgcgccagtttctgatcatgctcgcggtagttatcaatagtgagcttctggatattctcttctttgatccctgcaggggtgaaaaacagattacgcagattggtaatcgttacgccttccccttctttaccgcgaaatggaatttcatcgaaattgtagaaatagcagttatcgtaccagggcttacctttaaccagagtgatgagatattcgtacatgcctttgggcgtgctaccggcggtaattgccaggttaacgcgacgcatctttgacatataaccaagcagatgatgtgccgcgacacggctcatttcctggtaatcttcggtaatgatcaatttcatcttaatgccttattttatttaaataatttctgtacgaaggctgcataggcaggccgccagacatccatttcatggttcagacccggatattcctggtaatcaaacttaatttttttctgctcaagctcagttttcagcccggcgatatccttgccggttacgacatctttatcgcccacgaccacagtaaaattacgtagttgctggttaatagctgccggctcgttcagccgggcagcgaccccttcatctggtacggtcgtcgtggtaacaccactgaatgtggccagccagccaaagctttccagatgattcattcccgataccagtgcctgatacccaccttgtgaaagccctgccagtgcgcgaccatcggcatctttacggacattaaaacgcttgctaatcagcgggataatatcgttcatcagttcgcgatctgccgctttagcatttaacggataaaagactttacgtctctcctgaggaacgaaatcttcgggaataatgcccttcgcatcggtttcggtatccgggatcaccaccagcatcggtttaattttcccttcagccagcaggttatccatgatttgcgggatacgcccctgatcaatagcggaacgtccggtatcaccaaagccgtgatagaaatagagcactggcaaaggctcgcctatgccggtgtatcctggcggggtccagacatacatctgacgttcggattgcaatgcgttggagtggtaagttatggcgatcaaatcaccatgcacaacagaacgtgtatccagataactgcccggtaccagaatcatactggagttaacctggcgctgaggcttagtcattgctgtacctgtatcaatgctgcgtacaccatcaacattgaaaaaatactcgtacaggttgcctttcagaacaggcgtgcgccacgaccagactcccgcttcatctttagtcatcgggtgaatattgtccggaaccggaacacccaccactacggagacattttttgccccaggggcaaagtagcgaaaggtcacgctgttatcggtattgacctgagtcacatactgtttcaccggaatagtgggtgccgggctggctggcatatccgctgctatggcccattgagcagaaataccgctggcaatagccagcgttaaagcagcaatttttatattcatcgtaatattccttttattaagttccattaccaccagatttcagcctgggcaccgacagcaaactggtcgtctttattgtcttcaaaggtgaagccatccagttcattttccagagctttgatatacgtagcgtagaaacgaatttccgggcgcgaggtcaacatactggtattgactttaaaggtatggaagagcgtggttttataaccagattcattatatttattgctattcgcatctttgttttgctgggtgaaatagcccagttcaacacctgtctggttatattggtcccaaatataggccgggcgaacaaccgcacgaatagattcgaaatcagaatgtgcgcctgtttcgtagctataaatatcgttaccgaaggagtaaacaatcgcgttagccacaataaaatgatcgccgatataagcttcgccctgcgaagtcagacgaactgcagttccgcctgtatgatcaccataataacgaccattaaaggtagtaaatggacttgcaccagcataacgaccaaagttactggcgatagagttattcgcaaccaggaaggagaattcgttgaagccacccttatcaaatttctgcgttaaagatgtaccaaacatccaggtttctttccagtcataatacccgttattatcctgattatctttttccgatgcgctttcatttgctgagacataacgaccgctcaccattaaggtggctttatcccataacgggatatctttatagcgtaaatcaatggtattggtattaatctgctgtttgttttgcaggctgcgatcgtaatcatcgacatcttcacgaaccagcgcgatatcaattttacccggaccgactttccagttttccagacctacacctgcggcagcatcggtacgctgcgttttccagtcaagcatctggatttcaattttcggcgcaccgtgtttacccacccagaaatcagcctctggcgcaaagggcaggaaacctttggtggtaacgtacatatcagagaactgcataaagttctcaccaccggcgttatcgccaaaccagccagtagagtactgctgacccacgttaccatccatcatcacgatggcatcaacccgtttgccgttttcgttgtagacacgttgttttaactgcaaatcaaaccagccggagtattcgttaccaaagcggcccagagaaccaattgcccatgatttaggtgaaccatgagaggctgttccccaaccagaacggtagtagccgttgtaactaaagccgatttcatctttcacaaatttactgaaatctttcagagtcatggaagaataaatcgagcctgtctcactggcatttttctcttcatttttaaccagtacagcatcaggctttgcggcacgactggtcgggaatggattggcggcatacccttgatcattcgtacttacgctacgattcaccgtcgctggcgtatactttttcttctcttcatctttatattttttcagttcgctttgcgtttctcttaacgccttttctaatagctcaaggcgttgttccactgttaatgattcagccaatgattgtgcggaaaaggctaacggtgccattaataagatggcagaggtaataatatttcgtctaaacataatatccctttatggtgcaaagaaagaattaacgcatcgcatccagactgttctgaatgcgacgatatttaaggtgctttattggttatttttttaatgatagcccccgagttttgatcacttctgcataccatccgaagcttttcttgcgcgttcttgtgaggcttccttcaccattatcatcacgatccacataaataaagccgtagcgcttagacatttgtgaatgagatgcactgactaaatcaattggcccccaactggtgtaccccataatatccacaccatcggcaatcgcttcatttacctgtaccaggtgatcgtttaaataggcaattcgataatcgtcctgtatcgaaccatccgcttcaacgctgtcttttgcgcctaatccgttctcgacaataaataacggtttttgataacgatcccaaagtttatttaacagaacccgtaatccaaccggatcaatttgccacccccactctgaacttttcagatgcggattggggatcatattcagtatgttgccctgcgcatttttattaatgctttcgtcgtgggaaacacaaccggtcatgtaataactaaaagagatgaaatctacggtatgttttaaatcttctgcgtcactttcagtcatctcaatggtgatattgtggtcgcggaagaaacgctgcatatagccgggatactgaccacgcgcctgaacatcaccaaagaacatccagcgccggttctcttccatggcctgcaacatatcctgtggctggcaggtgagggggtaaaccagcccaccgagaagcatattgccaattttcgcttcggggatcaggctatgacaggctttaactgcccgcgcactggcaaccagttgatgatggatcgcctgataaacttccgcctcgccactctcttctgccagccccacgcccgtgaatggcgcgtgtaatgacatgttgatttcattaaatgtcagccataacgcaactttatgttggtagcgggtaaagaccgtgcgtgcgtaatgctcgaagtgatcgatgaccgcccgattagcccaaccgccgtagtttttcaccagcccatatggcatttcgtaatgggataacgttaccagcggcttgatccccgcctgcgccatttcatcaaacagccgctcgtaaaacgctaaccccgcttcattcggttcggcttcatcgccctgaggaaaaattcgcgcccaggcaatggaaatacgcagacaggtgaagcccatctcggcaaataacgcgatatcttccgggtaacggtgataaaaatcgatggcgacatctttgatattctctttccccaggatgcgcggttccatttttcccattacgccatgaggctgtaaatctgaggtcgtgatccctttgccatcttcctgccaggcgccttccacctgattggcagctgttgcaccaccccaaagaaatgtttctggaaatgctttcataattaactccttttatcgttagcgaatgatggataacagcggctcaccagcgtttatctgcgccgtgccgtggggtaatacgtccgtaaaatcatcgctattactgattaataccggcgtcgtcagatcaaatccggcctcgcgaatagcagggatatcaaaagaaatcagccgatcgcctgtattgaccttgtcacccacgttgacgtgagcggaaaagaatttgccgtccagttttacggtatcgataccgacatgaatcaggatctccacaccatcatctgactcaatgccaatggcgtgtaatgtggcgaacaacgaagcaattcgacctgccaccggagaacgcacttcaccaaccgagggcataatggcaatacctttacccaacaggccgctggcaaacgtggtatcagcgacgtgaatgagcggcacaatctctcccgtcatcggtgaacagataccgccctgctcaggtgtaataacctctggtgttttctcttgctgggcaacttgcgctgactgacgtttagcggtgatgaaatgaagcattaccgtaccgacaaatgcgcaaccgatggcaatgacaccaccaataacgctggcccatacggtgaaatcaatccccgttgacgggatggtttgcatgaaggtgaaaatacctggcaaaccaaaggagtaaactttcgtttgcgcgtagccaatgatggtggcccccaatgccccacttatgcaggcgataacgaaggggtacttacgcggcagattgacgccatataccgctggttcggtgataccaaacaaacctgtcaacgccgctgatcccgccaccacttttttctgtgcatcgcgttcgcagaggaagacgccgagcgccgccccgacttgcgccataatggcgggcattaacagcgggatcatggtgtcgtagcccagcacggtgaagttattgataattaaaggtatcaaaccccaatgcagaccgaacatcacaaagatttgccagaagccgcccattaccgcgcctgcaaatgcaggaaccgcctgataaagccagagataaccggcagcaatcagttcacttatccaggttgatagcggccccaccagcagaaatgtgatgggcgtgatgaccatcagacatagcaagggtgtgaagaaatttttgattgccgaaggtaaccatgcattaagtcggcgttccagaatgctgcacaaccaggcagaaaaaataatgggaataaccgatgacgagtaattcaacaatgtgaccggaatacccaggaaatccaggcccagcgcatccactttttgcccgttctcgaaggcagtcagaattaatggatgcactaacgctccgccaatcaccatggcagtaaatggattgccgctgaagcgtttccctgcggtgtagcccaggattatcgggaagaaccaaaacaaggcatcactggcgctaaataaaattaaataagtaccactttgttcggtcgtccactgaaaagtgagtgccagagccaacatacctttcaggatcccggttgccgccatcaaaccgatcagaggcgtaaaaatacctgaaataacataaacaaagcggtttaacagattacctttatcatcattttccggtgcctgttgcgctttttcgccaaggcctgccacgctgttaaccgccaggaagacatcggccacatggttacctatgacaacctgaaactggccaccgctttccaccaccataataataccgggggtctttttcagtacctcagcttgcgctttgctttcatcctttaacttaaaacgtaatcgcgttgcacaatgcatcagactcacaatgttatctgcgcccccgactcctgcgactattgttctggctaactccgtcataacttgccctctaccgctttgcggcaaaactccaaaaaaaaacctgaaaaaaacggcctgacgtgaatcaagcaatttttttcaggttttgcccgcttagtgcggtaacaatcctttattcagtaataatatttcagtgttctttgcgcacgcgctctatatttatggctaaaaacataatctctgcaggtgagattttacgttgatactgcaaaccaataaaaatggcgatccgctccgcacattgccatgcttgcgggtaattttgctttactgcttgttgtaatgattcatcactatcgttaatcgatgcatgttcaataatacgccaggataaaaatttcagatgcgtaaccagtcgctgataactcaagctttcttcctggtaattaaggctgaactgaaattttattaattgcagcatttctcgcattaattgcgtgacacctgcaacatcctccatatttccgctcatttgggcactgaccagatgcatggcaataaagcccacttcatctttcggtaactgcacgcccaaccgtttatcaataatggttaacgcttcttcccctagctggaactctttcgggtaaagtcgctggatatcccacagcagcgggttgggcagtagcacgttttgctgaaagcgtttaatcgcaaactggcaatggtcagttagcgagatataaatactgtcctgcaactttcccagacgctcctgcgccagagagataatacgatcacaggttgccatcacctcaagaggcatatgacttaagagttcgcttaatcgcccgttcagttcatgactgctcaaggcatactctttttctattccacttgagttaattctttcgcctgggcgtttttgaaagccaattccgcgccccatgacgactttttcccgctgttgatcatcaataaccaccacaacattattgttgagaattttggtgatttgcatgttcatagcaaggaccttttttataaacaaaaaaacccgacttcaccagtattctctggttatgtcaggttttgcctgcgaatgcagtaacaatccagtcattaattaatggtttttataacgaacatccaggttcgaaaattaatttagttgcgtgcagaaaaaatagcaatgctctatttataaaagtatgaccatgctcgcagttattaattttgtgtaattttaggattttataaagttatatataacaaatcccaataattaaattattgggatttacttggtgaattatttatcgctatctttttctgccagcagtttatcgagctcgtcaccaccgacgtgacggaaatcctgccccttcacgtagtagaagataaactcacaaatattctggcagcggtcgccaatacgttcgatagaacgcgcacagaataacgcggtaagtacgctcggaatggtacgcgaatcttccatcatgtaggtcatcagttgacgaacaataccttcgtactcctgatcgacttttttatcttcacgataaatacgtaccgcttcgtcaatgtccatccgcgcgaacgcgtccagcacgtcgtgcagcatttggatggtatgacggcccagcgactccagacttaccagcaatggctgatgctgctgggagaatttctccagtgcagtacggcagattttgtccgccacgtcgccaatacgctccagctcggcaatggttttactgatcaccataaccagacgcaggtcgctcgccgtcggctgacgtttggcgataatgcgcacgcaggcttcatcgatcgccacttccatcatgttgacgttcttgtcgccttcgatgacgcgcttcgccagatcgctgtcctggttatgcatcgcggtgattgcatcagaaagctgctgctccaccatgccgcccatggtcatcacctgcgtgcggatgctttccagttcggcgttgaactggccggaaatatgtttattaagattgagactgtccataacgcactcctgaatcaaccgtaacgaccggtgatgtagtcttctgtttgtttcttcgctggcttggtgaacagatcgtccgtgttgctgaactcaatcaattcgcccaggtacataaacgccgtgtggtcggaacaacgcgcagcctgctgcatgttgtgggtgacgatcaccacggtgtaatcctgcttcagttcggtgatcagctcttcaatacgcccggtagagatagggtcgagtgccgaacacggttcgtcgagcagcagcacttccgggcgaatggcgataccacgcgcaatgcacagacgctgttgctgaccaccagagagagagtaaccgctctggtgcaatttatctttggtttcgttccacaatgcggctttggtcaatgcccactgcacgcgctcgtccatgtcagcacgggagagcttctcaaacagacgcacgccaaaagcgatgttgtcgtagatggacattgggaacggcgtcggtttctggaacaccatgcccactttcgcacgcagcagggcgatatcctgagagttggtcaggatgttgtcgccatcaagcagaatttcaccttccgcacgctgttccgggtacagttcaaacattttgttgaaggtacgcagcagcgtcgatttaccgcagccggacggcccgataaacgccgtaacctggtttttggcgatatccaggttgatgtttttcagggcatggaatttgccgtagtagaagttcaaattacgaacctgaattttactcggggcagtttcaaccatactcattgcaatcttttcctcatcgtgcctgatgcacttcgcgaatcaggcttaccgtaggccggataaggcgtttacgccgcatccagcaaagtgttaaccgtgtttattcttcgcaaaaacaacgcgcgccagaatgttcagcagcagtacgcacagggtaatgatcaacaccccggcccaggccagttgctgccattccgcaaacgggctcatcgcaaacttaaagatcgtcaccggcaggttagcgatcggctgcatcatgtccgtgctccagaactggttggagagcgcagtaaacagcagcggtgcggtttcaccagcaatacgggcaatcgccagcaggataccggtcatgatcccggacaccgacgctttcagcgtgatcgcggcgatcatcttccacttcggcgtacccagcgcataagccgcttcacgcaggctgtccggcaccagtttcagcatgttctcggtggtgcggataacaatcggcacctgcaacagcgccagcgcaatcacgcccgcccagccggagaagtgctccatctgcgccaccacgatggtgtaaacaaaaagaccaaccacaatcgacggtgcggagagcaaaatgtcgttaatgaagcgaatcacttctgccagccaggatttacgaccatattcagccagataaatccccgccataatgcccagcggcgtaccgaataccgtggcccacaaaattaacaggccgctacccgccagggcgttcgccagaccaccgccttccgtatttggcggcggcgtcatttcggtgaacagcgccagcgacataccatcgataccgcgagtgatggtggacattaaaatccagatcagccagaacagaccgaaggccatcgtcgccatcgagagcgtcagcgcaatacggttcttaaggcggcgacgcgcctgcattttacggcgggattcagccagcgccgcagtggtttgcatttcaaccatagccattagcgtgccccctcattcttagccaggcgcataatcataaacttcgatgcggcgaggacgatgaaggtaatcacaaacaggatcaggcccagttccatcagtgcagcaacgtgcagacccgactctgcttccgcaaattcgttggccagcgcagaggtgatactgttgcccggcatatacagcgaggcgctgtcgagttggtaggtgttaccgatgataaaggtcaccgccatggtttcaccgagcgcgcgccccagccccaacataatgccgccgataaccccatttttggtgaacggaagaacgatacgccagataacttcccaggtggtgcagccaataccgtaggccgactctttcatcatcaccggggtttgttcgaatacatcgcgcattaccgctgcaatgtacggaataatcatgatggcgaggatcacgcctgccgcgaggataccgataccaaaggccgggccggagaacagcgcgccgacaatcgggatattcgacatgatattgccgaccggctcctggaagtaaacggcgaacagcggggcgaagataaacaagccccacatgccgtaaacgatacttggaatggcagccagcagctcaatggcgatacccagcgggcgtttcagccagccaggcgcaagctcggtcaggaacagggcgataccaaaactcaccgggacggcgatcagcagcgcgataaacgaggtcaccagcgtaccgtagatcggcaccagcgccccgtagatatcgttcggcgcatcccactctttggtccacaggaaagccagaccaaatttctgaatgctcggccaggaggagatgatcagagagacaataatgccacccaacatcaatagcacaatcagcgccgccagttttaccagcacgctgaaaattatgtcgccctttttacccggtgggttaaaagcaggcttggttgcagccataagttactcttcagttaaacgcgtttacaaagtcattttgtaatgccggatgcggcgtaaaacaccgtacccggcctggagttttattagtacagcggcttgccgctactgtctttaatattggtcttccacgcagcgcgaacctgttcaactacgctatccggcaggctggcataatccaggtcgttcgcctgtttagccccggttttgtatgcccagtcgaagaacttcagcacttcagtgccttgttctggtttcttctgatctttatggatcagaatgaacgtggtagaggtaataggccatgcatcttcgcctttctggttggtcagatcctgagcgaatgttttgctccagtctgcgccttttgctgcattagcgaagttttcttcggtcggactcaccggtttgccatcagcggagatcagtttggtgtacgccaggttgttctgcttcgcgtaagcatattcaacgtaaccaactgcacccggcagacgctgaacgaacgcggcgataccgtcgttacctttaccgcccagaccgatcggccattttacggtagagccagtaccaacgttgtttttccactcttcgttcactttcgccaggtagctggtgaagacgaaggaagtcccggagccatctgcgcggcgtactacagcaatgttctgtgaaggcagtttcagacccggattcagtttggcgatggcttcatcatcccacttcttgattttgcccaggtagatgtcgccgagggttttaccatccagcaccagttcgccagacttcagacctggaatattaaccgccagcaccacgccgccaatcacggtcgggaactggaacaggccttcctgagccagtttttcgtcagacagcggcgcgtcagaagcaccaaaatcaacggtattggcgatgatctgttttacaccaccagaagaaccgataccctggtagttaactttattaccggtttctttctggtaagtgtcagcccatttggcatacaccggcgcagggaaggttgcacctgcacctgtcaggcttgcttctgcaaacacagagaaagcgctcatcgataaggtcgcggcgacaacagttgcgacggtggtacgcataactttcataatgtctcctgggaggattcataaagcattgtttgttggctacgagaagcaaaataggacaaacaggtgacagttatatgtaaggtttatgacagttttatgacagagagagaatgtcttcagtctgatttaaataagcgttgatattcagttaattacaaatattaataacgaagagatgacagaaaaattttcattctgtgacagagaaaaagtagccgaagatgacggtttgtcacatggagttggcaggatgtttgattaaaaacataacaggaagaaaaatgccccgcttacgcagggcatccatttattactcaaccgttaccgattttgccaggttacgcggctggtcaacgtcggtgcctttgatcagcgcaacgtggtaagccagtagttgcagcggaacggtgtagaagattggtgcaatcacctcttccacatgcggcatctcgatgatgtgcatgttatcgctccccacaaaaccagcatcctgatcggcgaagacatacaactgaccgccacgcgcgcgaacttcttcaatgttggatttcagtttttccagcaattcgttgttcggtgcaacgacgataaccggcatatcggcatctatcagcgccagcggaccgtgtttcagttcgccagcagcgtaggcttcagcgtgaatgtaagagatctctttcagcttcaatgcaccttccagcgcgattgggtactgatcgccacggcccaggaacagcgcgtgatgtttgtcagagaaatcttctgccagcgcttcaatgcgtttgtcctgagacagcatctgctcaatacggctcggcagcgcctgcagaccatgcacgatgtcatgttcaatggaggcatccagacctttcaggcgagacagtttcgccaccagcatcaacagcacagttaactgggtggtgaatgctttggtggaggccacgccaatttccgtaccggcgttggtcatcagcgccagatcggattcgcgcaccagagaagaacccggaacgttacagattgccagcgaaccaaggtaacccagctctttcgacagacgcaggcccgccagggtatccgcggtttcgccagactgtgacaaggtgatcatcaggctgttacgacgcacggcagatttgcgatagcggaattcagaggcgatttcgacgtcgcacggaatacctgccagcgattcaaaccagtagcgggaaaccataccggagttataagaagtaccacaggcgaggatctgaatatgctcaaccttcgacagcagttcatcggcgttcggtcccagctcgcttaaatcaacctgaccgtggctgatgcgcccggtaagggtgtttttgatcgcgttcggctgttcgtagatctctttctgcatgtagtggcggtaaatacctttatcgcccgcgtcatattgcagattggattcgatatcctgacgttttacttccgcgccagttttatcgaagatgtttaccgaacggcgagtgatttccgcaatatcgccctcttcaaggaagataaaacgacgagtcactggcaacagcgccagctggtcagaagcgataaagttttcgcccatacccaggccaatcaccagcggactaccagaacgtgccgccagcagggtatccggatgacgggagtccatgatcactgtaccgtacgcaccacgcagttgcgggatagcacgcagaactgcctcacgcagagtaccgccttgtttcagctcccagttcaccaaatgtgcaatcacttcggtgtcggtttcagaaacgaaggtatagccacgtgcttttaacgcttcacgcagcggttcatggttttcgatgatgccgttatgcaccaccacaatgtgttcagaaacatgcggatgcgcgttagcttctgaaggttcaccatgggtcgcccagcgagtgtgagcaataccggtgccgccatgcagaggatgttcttccgctgcctgagccagcatctgtactttaccgaggcgacgcaggcgggtcatatgaccttctgcatcaacaacggccagaccggcagaatcatatccgcggtattccagacgacgtaaaccttcaagaaggatttctgctacatcacgttgcgcgatcgcgccaacaattccacacatagtttttgattccgatttatatcgttgtcggtcaacctgtatgcccgtttttcgggcgccccgagccttgtagagagtggggttatttttatagttactgcttgtgggcgggagattatgttatctcctcatcccatatgaccggattacccggccagaattactttttctttatcggacgacgccagccttctttttgagtctgcggcacacggctgatagccagggcattttcgccgacattacgcgtcacggttgtacccgcagcaatggtcgcgcctttgcctactgttaccggggccaccagttgagtgtcggaaccgacaaacacatcgtcgccgataatagtcttaaatttattcgcaccatcgtagttgcaggtaatggttcccgcgccgatgttaacgttatcgccaatttccgcatcgcccaggtaagtcagatgaccagctttcgagcctttacccagacgcgcttttttcatctcaacgaagttaccgacgtgtgcaccttccagcaactcagcaccaggacgcagacgggcaaacgggccaatagtacaggccgctgccagattcgcatcttccacgacggtatacgggctaatttcgcaatcatcgccaatcacgctgtttttaatcacgcaaccggcgccgattttcacgcgatgaccgagagtcacgttgccctcgatgataacgttagtatcaatttcaacatcgcgcccgtgagtaagcgtaccgcgcagatcaaaacgcgccggatcgcgcagcataacgcctgctaacagcagtttttcagcctgttcggactggtaaacgcgctccagtcgggagagttgcaggcggttattcacgccttctacttcgcttaaacgttgcggatgaacggcgacgatttcacgtccttcctgatacgccagcgcaataatgtcggtgatgtagtattcgccctgagcattattgttggtcagcttcgccagccagcgtttcatatctgcgccgttggcaatcagaatgccggtgttgatctcctgaatctgacgctgctcgtcggtggcatctttgtgctcaacaatgccggtaactttgccgttttcacgggtgatacgtccataaccggtcggatcatccagttttaccgtcagcagaccaatgccaccctgcggtttagcatcacgcagacgctggagtgtttcgacagagatcagcggcacgtcgccgtagagcattaaaatgtcttcatcatcggcaaagaaaggtgcggcctgctgcatcgcatgacccgtacccagctgttctgcctgaagcacccagttcaggttgtcgtctttcagcgcctgcttaagcagatcgccgccgtgaccatacacaaggtgaacgtgcgctgcgcctaattcattcgcagcatcaatgacatgctgaaccatcgctttcccggcaagggtatgcagcactttcggaagatcggaatacatgcgcgtgcctttgcctgcggcaaggatcactacgctcatagcattattcaacatacgcgtcctgactgtaatttgagaacgaatttaaaccgcttcaccttgaaaaaactacatttttttcatcgtgaaatggacagaggataaattgttcaataacggattatccccgctgacgaaagcgccattttcgaccatcgtcacgccttttgtctgcagaaaattaaggcagtaccttcatttaagcgtcaggtggatgtttttgctcttatttcgatcaatgaataaacgggaaaacaggggtgttttatatcatcaggatctatgtgaacgcttttcaggacgggtcaatacgcgtaaaaaaaagccagcctgttgccagactggcttttgtgcttttcaagccggtgttacatcgcttttttggtcaactcgataacgcgcagctgcgcgatcgctttggccagttccgcagacgcctgagcgtaatctacgtcgccgtgagagctgctaatgtgctcttcagccttacgtttcgcttccatggctcgcgcttcgtcgagatcctggccgcgaattgcggtgtcggccagaacggtcacgttgccaggctgcacttcaagaatgccgccagacagatagataaactcttcgtgaccgtgctgtttcacgatgcgaatcataccaggcttaatggcggtgagcagcggtgcgtggccagggtagatccccagttcaccttcgctacccgttacctggattttctcgaccagaccagagaacatttgttgctctgcgctgacgacgtccaggtggtaagtcattgccatatcaccctccgattaaggcgttaaagttttttggctttttccacagcttcttcgatggaaccgaccatgtagaacgcctgctccggcaggtgatcgtattcgccttccatgatgcctttaaagccacggatggtgtctttcagggagacgtatttacccggagaaccggtgaatacttctgccacgaagaacggctgggacaggaagcgctggatcttacgagcacgcgctaccaccagtttgtcttcttcagacagttcatccatacccaggatggcgataatgtctttcagttcctgataacgttgcaggatggactgaacgccacgcgcagtgtcgtagtgttcctgaccaaccaccagcgggtccagctgacggctggtggagtccagcgggtcaacggccgggtagatacccagagacgcgatctgacggctcagtaccacggttgcgtcaaggtgcgcaaaggtggttgccggagacgggtcagtcaagtcatccgcaggtacgtatactgcctgtacggaggtgatagaaccggttttggtggaggtgatacgttcctgcagaacgcccatctcttccgccagggtcggctgataacctaccgctgaaggcatacggcccagcagtgcggatacttcggtaccggccagggtgtaacgatagatgttatcgacgaacagcaatacgtcacgaccttcgtcacggaatttctcagccatggtcagaccggtcagagcaacgcgcagacggtttcccggcggctcgttcatctggccatacaccagggatactttgtcgataacgttggagtcggtcatttcgtggtagaagtcgttaccctcacgagtacgttcacctacgcccgcaaacacagagtaaccggagtgctcgatcgcgatgttacgaataagctccatcatgtttacggttttacctacacccgcaccaccgaacagaccaactttaccgcccttagcgaacggacacatcaggtcgataactttgataccggtttccagcagttcctgagagtttgacagctcttcgtaggaaggtgctgcgcggtgaatcgcccaacgctcttcttcaccgatctcgcctttcatgtcgaccggttcacccagtacgttcatgatacggcccagagtcgctttacctaccgggacttcgatcgggtgttcgaggtcttttacatccagaccgcgacgcagaccgtcggaggaacccattgcgatggtacgcacgataccgccgccgagctgctgctgaacttccagcaccagacgctcattaccattttgcacctcaagagcatcgtacacgcgcggtacggcatcctgagggaattcgacgtcaactacggcgccgattacctggacaatctttccagtagccatcttaaatcctctacgaaataacctgtttaaaccgcggcggcccccgagacgatctcggtgagttcctgagtaatgctggcctgacgagctttgttgtataccaactgcagctctttaatcaggctgccgccattgtcggtcgcggctttcatcgccaccatacgggcggcctgctcgctggccaggttttcaaccacgccctgataaacctgagattcgacataacgacgcagcagggtatccagcaacgccttcggatcgggttcgtacaggtaatcccaggatttgtgtttcagatcatcatcatctgatgccggtaacggcagcagctggctgatggtcggaacctgagacatggtgttaataaatttgttgctgacaatgtaaagcttgtccagacggccttcgtcgtaggcctgcaacatcacttttaccggaccgatcagttcggacagggaagggttatcccccatgccggtgacctgggcaacaacattgccgcccacggagttgaagaacgacacgcctttcgagccgatcattgcgaggtcgcattgaacgcctttgtcggtccaggtcttcatttccgccagcagttttttgaacaggttaatgttcaaaccaccgcacaaaccacggtcggtcgacaccaccaggtagcccacgcgtttaacgtcgcggtcttccaggtaagggtgcttatattccagattaccgtgtgcaaggtgaccaatcactttgcgcatggtttctgcataaggacggctggccgccatgcgatcctgcgatttacgcattttggaagcggcgaccatctccatcgctttagtgatcttttgcgtgttctggacgcttgcgatcttactacgtatctcttttgcgccggccatgagcttctcctcaatgccttgcggcctgccctaaggcaagccgccagacgttaccaggattgggttgctttgaaggaatcgaggatgcctttcagcttgccttcgatttcgtcgttgtagccaccggtctggttgatctcttgcatcaacggagcgtgatcacggtcgacgtaagccagcagagcggcttcgaagctaccgattttcgacagttcaacatccgccaggtaaccacgttctgctgcgaacagaaccagagactgttgcgctacggacatcggcgcatactgtttctgtttcagcagttcggtcactttctgaccgtggtcaagctgcttacgtgttgcatcgtcaaggtcggatgcaaactgagagaacgctgccagttcacgatactgtgccagagcggtacggataccaccggacagttttttcatgatcttggtctgtgctgcaccaccaacacgggatacggaaatacccgggttaaccgcaggacgaataccggcgttgaacaggttggtttccaggaagatctgaccatcggtaatggagattacgttggtcggaacgaacgcagaaacgtcacccgcctgagtttcgataatcggcagcgcagtcagagaaccggttttccctttcacttcacctttggtgaaagcttcaacgtattcggcgttaacacgcgcagcacgctccagcagacgagagtggaggtagaatacgtcgcccgggaatgcttcacgtcctggcggacgacggagcagcagggagatctgacggtaagcaacagcctgtttagacaggtcatcgtaaatgatcagcgcatcttcaccgcggtcacggaagtattcacccattgcgcaaccagcgtacggtgccaggtattgcagtgctgcggattcagacgcggttgctaccacaacgatggtgttagccagtgcgccgtgctcttccagtttacgtaccacgttagaaatggtggacgctttctgaccgatagcgacatagatacatttgataccggaatcgcgctggttgatgatggcatcgatagccagtgcggttttaccggtctgacggtcaccgatgatcaattcacgctgaccacgaccgattgggatcatggagtcaacggctttataaccggtctgtaccggctgatctacggactgacgttcgataacgcccggagcgattgcttctacagcagagaagccgtcgtgatccagcggacctttaccgtcgattggtgcacccagagtgttaaccacacggcccagcaggccacggccaaccggaacttccaggatacggccagtacacttaactttcatgccttcggcaaggtcagcgtacggacccataacaaccgcacctacagagtcgcgctcgaggttcagtgcgatagcgtaacggttacccggcagggagatcatttcaccctgcatacaatcggccaggccgtgaatgcggataacaccgtcacttacagaaacaatagtaccttcgttgtgagcttcactcacaacattgaactgagcaatgcgctgcttgatcagttcgctgatttcggtggaattcagttgcatgctccagtccccttaagactgcaagacgtctgcaaggcgctcaagacgaccgcgtacgctgccatcaatgaccatatcacccgctcggatgataacgcctgccattacagacttatcgattttgcaattcagcttaactttgcgtgacagacgtttttccatcgcagcagaaattttcgcgagctgttgttcactcagtgcggcagcggaaatgacgtctacctcagcggtagcctcactcacggcacgcaggtgaataaactgctccagaacatccgggagcgccttaagacgaccattttcagccattacccgaatcaggttctgaccgttttcgtccagttgctcaccacaaactgcgataaacgactcggcgagcgtttctggcgcaagcgcgccagagagaagctctgccatttgttcgtttttggttacctcggcggcaaacgccagcatgtcctgccagcgttctacactttggtgttcgacggcaaagtcaaaagctgctttggcgtaggggcgagctaccgtaataaattcagacatcagcccctccctccttacagttcagcgacaagtttatccacgatgtcgctgttagcagcttcatccacggaacgttcgatgatcttctcggcgccagcaacagccaggatagcaacttgcttacgcagctcttcacgggcacgtttacgctcggcttcaatttccgcctgcgcctgggccacgattttagtacgttcctgttctgcctcagctttcgcttcatccagaatctgcgagcggcgtttgttagcctgctcgatgattacctgggcttccgctttcgcttttttcagctggtcggtcgcgctggcctttgcaaggtcaaggtccttatgtgctcgttctgcggaagcaaggccgtcagcaatttctttttgacgtttttcgatggctgccattaatggcggccatacgtacttcatgcagaacagaacgaacaggacaaacgcgatggcctggccgaggattgttgcgttaagattcacagcacaatgcctctatttagttaacgttctgatattgctctttaaataaaagcaacgcttactacgcgacagcgaacatcacgtacagacccagacctacagcgatcatcgggatagcatccaccagacccataacgataaagaactgagtacgcagcagaggaatcagatcaggttgacgcgctgcgccttccaggaatttacccccgaggatgccgataccgatcgcagcaccgattgccgccagacccatcatcacagcggcagccatgtacagcagatccatattcaggttttccatgacagtctccagtttgtttcagttaaaacgtagtagtgttggtaaattaatgttcttcagacgccatcgacagatagacgatcgtcagaaccatgaagatgaaggcttgcagcgtaatgatcaggatgtggaaaatggcccacggcacattcaggatccactgtgaccaccacggcaacagaccagcaatcagaatgaaaatcagctcaccggcatacatgttaccgaacagtcgcaaaccgagtgaaactggtttggacagcaggcttaccccttcaaggattaagttgacaggaatgaacgcccagtgattgaacggctgcagcgtcaactctttcgtgaagccgccgatgcctttcattttgatgctgtagaacagaatcaggataaatacgcccagtgccatagacagcgttacgttcacgtcagcagacggaaccacacgcagtgcaggcagacccagtacatgttcagcaatgtacggcagcaggtcgataggcagtaaatccatcaggttcatcaggaatacccagacgaagatcgtcagggccagcggagcaatcagcttgcttttgccatggtacatgtctttcacgctaccattaacaaagccgatcaccagctcaatcgcggtctgaaacttacctggcacgccgctggttgcctttttggctacactacggaataaaaccaggaacaacagacccagcaccaccgagaagaacatggagtcaatattgattgtccagaaggtggctggggggttatgtggatccaccagcgagaatgtacgcaggtccagctgaaggttattcaggtggtgtcctatgtaatcctgcggcgtcatattttctgaagccatgatgccttttaccctttgttgttaattacagccggtgccagtatctgaaccaccagcaccaaaacccacgtaacgatcagcggcaagaataccgcctttaaaaccgccaacgccaccaccagtaacaccaacatcgccagaactttgaaagcttcgccaaatgcgaatgtccaggccacccggcctttcgctggtgtatgcgcctggtgacgccaggcaaatatcataaacaaaacgttaggcagaaagactgccaggcccccgcttattgcagagacgccccagaaggggtctttgaggctgaacagcaatccacttgctatcaccaccagtaactgaacgagcagaagcttccgagcaacgtttcgactcacgagcgacacagacatcacgtttttcactcctgctcccttcgaggtatgccgcgtgtcgtataaaactttctttaaggcttagagtcaagcatcaaaaagcggtcaaattatacggtgcgcccccgtgatttcaaacaataagtagccaaaaggtgaataaatgtttaaatatttttccagtgcatacaattgcgacttttctgcaaaccctgttcgatcatgaaaaactgtaaataacgcgtaaacactggtgataaagcgtgcttcagatcacatattgcgcatgttcgcgcacagcatatttatttacttggcaaatgatgcctttgcaagtttatgatatttcagtctaaaaacagatactgttttaataaatgacatttacataacaaaaaccacccattgacatttttaataatattttaacagtcaatgatgattcttagcgccgatttttagcagactgatattttcacttatgacttattttctgcttaccaaaaaaagccacgttatcttgttgatacaaaagagtgaacgtggcgttaaatgtaaccagttatatcagtagaaaacctggttgttgttaacagtctaaccggtcaattttttatgatttttttgataaaaattaaattttatttgctttaatcaccaccagatgacgttcgccatccagggctggaacctgaagtttaaccactgattcgacctgatattcttcgggcaacaaagcgatttcatcttccggcatttgccctttcagcgcgtagaaacggccttgctcaccaggaagatggtggcaccagctcaccatatcgttcagagaggcaaaagcgcggctaattacgccatcaaatggcggctctgacggaaactcttctaccctactctgtactggctcaatattctccagtttaagctcatgttgcacctgacgaaggaaacgcacgcgtttaccaaggctatccaacaacgtgaaatgagcttcaggacgcacgatagagagtggaatgccaggcagtcccggtccggtgccgacatcgataaaccgttcaccttgcagatacggtgccaccacaatgctatcgagaatatggcgtaccagcatctcattaggatcgcggaccgaagtcaggttgtacgctttattccatttatgcagcatattcacgtaggcaataagctggtttttctggtgatcggtaagcgaaatacctgcgtctttcagcagtaaggagagtttgttgagcacggtgattacctgttcttgatgcgttgcctggtaagcgggtgcataccaggcatttttaatgcgttatgcgctacgacgcagcataccctgttttttcagccacaccagcagaatggagatagccgcaggcgtgacgccagaaatacgcgaagcctggccaatagaggccggtttgtgatcgttaagtttggcgatcacttcgttagaaagaccggatacctggcggtaatccagcgtcgctggtagcagggtattctcgttacgcagctgcttttcgatctcatcttgctggcgcgcgatataaccttcgtatttaacctgaatctcaacctgttccgcagcctgttcatctgtcaacgcaggggcaaacggtgtcagcgtggttaatttttcataagtcatttcaggacgacgtagcagatcttcaccactggcttcacgggaaagcggcgcagtcaggtgagcattcacttcggctgcagcttccgccgacggggttacccaggtcgatttcagacgctgacgctcacgctcgatattctcaagtttctcgttaaagcgcgcccaacgttcgtcatccaccaggcccagttcgcgaccgatttcagtcaaacgcagatcagcattatcttcgcgcagcatcagacgatattctgcgcgcgaggtaaacatacgatacggttctttggttcctaaagtgcacaggtcatcaaccagtacgccgagatatgcctgagaacgcgccggagcccaaccttctttgtcagcagacagacgggcagcgttaagaccagccagcaaaccttgcgcagcggcttcttcgtaaccggtagtgccgttaatctgaccagcaaagaacagcccctggataaacttgctctccagcgtcggtttcaggtcgcgtggatcgaagaagtcatactcaatggcataacccggacgcacgatcttcgcgttttccatcccctgcatggagcggacgatttgcatctgcacatcgaacggcaggctggtggagataccgttcggataaatttcgttagaggtcagcccttccggttcaaggaagatctgatgctgatttctgtcggcgaagcgcatgactttgtcttcgatcgacgggcagtagcgtgggccgacaccttcgatcacccctgcgtacattgggctacgatcgaggttactgcggatcacatcatgggttttctcgttggtatgagtgatataacacggcacctgctggggatgctgggacgcattgcccataaacgagaatactggcattgggttatcgccatgctgttgcgccagtacgctaaagtcgatggttcgagcatcaatacgcggtggtgtcccggttttcagacgaccaacgcgcagcggcagttcacgcaaacggcgagaaagcggaatggacggcggatcaccagcacggccaccgctgtaattatccagaccgatatgaattttaccgtcgaggaacgtcccaacggtgagcacgacagctttggcacggaacttcagtcccatttgggtaacggcaccgaccacgcgatcgttttcgacaataagatcttcaactgcctgctggaagatcatcaggttcggttggttctccagcgccgtacgtaccgcctgacggtagagcacacgatctgcctgagctcgggtagcgcgaaccgccggtcccttgcttgcgtttagtatcctaaactggatacccgcctgatcgatcgctttcgccatcagaccgccgagtgcatccacttcttttaccagatgtcccttcccaataccgccgatcgccgggttgcagctcatctgccccagagtgtcgatattgtgtgtcaaaagcagagtctgttgacccatacgcgccgcggccatcgcggcctcggtgcctgcatgacccccgccaatgatgatgacgtcaaaaggatccggataaaacatggtgattgcctcgcataacgcggtatgaaaatggattgaagcccgggccgtggattctactcaactttgtcggcttgagaaagacctgggatcctaggtattaaaaagaagatctatttatttagagatctgttctattgtgatctcttattaggatcgcactgccctgtggataacaaggatccggcttttaagatcaacaacctggaaaggatcattaactgtgaatgatcggtgatcctggaccgtataagctgggatcagaatgaggggttatacacaactcaaaaactgaacaatcgttgttctttggataactaccgtttgatccaagcttcctgacagagttatccacagtagatcgcacgatctgtatacttatttgagtaaattaatccacgatcccagccattcttctgccggatcctccggaatgtcgtgatcaagaatgttgatcttcagtgtttcgcctgtctgttttgctccggaatttttgagttctgcctcgattttatcgatagccccacaaaaggtgtcatattcacgactaccaataccgattgcgccaaagcggaccgcagaaagatcgggcttctgttcctgcaatgcttcatagaaaggagaaaggttgtccggaatatctccggcaccgtgggttgagctgataaccagccagatccccgaggcagataaatcttccaacagcggaccgtgcagcgtttcggtggttaaacccgtctcttccagcttttcagccaggtgttctgctacatattcggcaccgccgagggtgctgccgctgataagagtgatatctgccataaaccgccacctttattaagagtagcgtattgtacgctgtgaacgcgttgggatctacctgtggaaaagtatgggattaaaaaagccgatcagggcttaatggtacgcatgatcggattctgcaggacgatcagtgtctcggtggactgaatttcatcaattgtttggatcttgttgataagtacatgctggagagcatcgatcgaacggcacatcacttttataaagatactgtagtggccggttgtgtaataggcttcagtgacttcatcgaggctttccagctttgccagcgcggaaggatagtctttggcgctctttaatataatgccgataaagcagcctacgtcataaccaagctgcttcgggctgacatcaatacgcgccccggtaatgatccccgcctgcttcattttctctactcgaacgtgaatcgtccccggactgacgccaaattgtttcgccagttcggcgtaagcggtgcgcgcattgcccattaatgcttccaggatgcctcggtccagattgtcgatcagataattttccataggattttcttatgcggattgatgattcattctattttagccttcttttttaatgaatcaaaagtacgtgaggctttttattgaatgattattgcatgtgtgtcggtttttgttgcttaatcataagcaacaggacgcaggagtataaaaaatgaaaaccgcttacattgccaaacaacgtcaaattagcttcgtgaaatctcacttttctcgtcaactggaagaacgtctggggctgatcgaagtccaggcgccgattcttagccgtgtgggggatggcacgcaggataacttgtcgggctgtgaaaaagcggtgcaggtaaaagtgaaagctctgcctgatgcccagttcgaagtggttcattcactggcgaagtggaaacgtcagaccttagggcaacacgacttcagcgcgggcgaagggctgtacacgcacatgaaagcccttcgccccgatgaagaccgtctttccccgttgcactcggtctatgtagaccagtgggactgggaacgcgtaatgggcgacggcgagcgtcaattctcgactctgaaaagcacggtagaggcgatctgggcgggaattaaagcaaccgaagctgcggttagcgaagagtttggcctggcaccgtttctgccggatcaaatccacttcgtacacagccaggagttactgtctcgttatccggatctcgatgccaaagggcgtgagcgggcgattgcgaaagatcttggcgcggtattcctcgtcgggattggcggcaagttgagtgatggtcatcgtcacgacgtgcgcgcaccggattatgatgactggagcaccccgtcagagctgggccatgcgggtctgaacggcgatattctggtatggaacccggtactggaagatgcgtttgagctttcttccatggggatccgcgtggatgccgacacgctgaagcatcagctggcgctgaccggtgacgaagatcgcctgcagctggagtggcatcaggcgctgctgcgcggtgaaatgccgcagaccatcggcggcggtatcgggcagtctcgtttgaccatgctgctgctgcaactgccacatatcggccaggttcagtgtggtgtatggccggcagctgttcgcgagagcgtcccttctctgctgtaataatttatcgccgccagcgtctgagcaggcggcttcgcatcccggtatcaaagcgccagatatgatcgaaaatgcgcatgatgccgggtttgccatgtgccgacatcgccacggcatgaaagcgatgctgatgtacccgctgcaactctttcactttgctcgtcacgtcgtcaggcaatcgctgggcgataaaatcagaaatcaccaccgcatcggcatcaaaccattcccggctttgcaagcgttccataatggcgcgaaaacaactggcaagatcggtgccgccacgaaactgctggcttaaaaaacggattgcttgttcgatgccttgtgggcctgaaagctcataacggacgatctcggtggaaaatagcataatatagcagcgccggttttcagcgagggctatgcgcatcaaggccaggcagaacgctttcgcacactgttcattaaagccgcccattgagccggaagtatccacgcagacaataaacggtccgcgcggctgttcgtcgtaatctttatgcaccaccgggcgttcgatcattttttcacgccacgactcaccatgcaggcgataggtgagcaactgtttttccaccagccgacggtaaaactcatactccagttcagttatccctagtgtcgccagttctggcggcaagagacgtaaaatatcatcgctttgctgcagaccatcaacctgctcaggaactgtcgccggttcgcgcaccatggtgcggaaggtttccatctgcgcatcgttgcgcggtattgatttggcttcccgggaacgccccagctgttctgccagacgtttcagttccggctgttcgttaagaaattcaccgtatttcacaatcaactgatagtcgccacgtttaagctgaccggcgctcatatcccacagacgaccagctgcggtattgttatctgcgagaatcggttcaagttgcccgctcagcgtcatgcgttcctgaacttcactcaacagttgttcgcgttcttcttctaatagctgctgatttaacgtcgttgcttgcacgatcaggcttaaacgccagcgctggagaaaaagcgtgtgtaacgctgaagtgatcgtgctgttagcatcaaccaactgtcgggcttgttctgcccatggggaattcagacgatgcagtaagtccaggatctgtggtagctgcacaataaattgcggcgtggagaggagctgactttgctgatagcacatcacctcttcggtgagttccggcgggactcgggcatctttaagccgactgcgcagcgcctcacgccagcggggaacatcatcagtgattgccgccttcagtcgtgggaatttttcaaagaagactgccagctgcggtgaggccagcagcgcgatgatcatctcttcgatcaatccctcttcgctgacggccagcatcacattaagcgtatccagcgttagcattgttgtgcctggcgaatctgtgcgccgacatcctgtaggctggcttcaatgcgacctaaccagtcgccagggataaacagacatttttgctgttcgctgaataaagcgtgttgcttgcgccagtcgctttcaagctcttccagttgttgttttatttcacctggcagaccttcagccaatgaaccgggaagtgctagcgtactgccttgtaaacttacatcgcgtacaacaagatgttgggcgctatcgacttccagattcagtttctgggcaaagccgataccgttcagtttgccgcgaatctcaccacctttactcagccactgttccagcgcgctacgctcaaaggagatatgaaccacttccatatcatgcaattttaacggtttttgcagcagcagagtcagagtggaagcagtaacgttaacagggagttgatactgctgacgacggctaaaaatgccgcccagacgaattaccgttaaggctgttttatcgctttgttgctgctgaagttgcaggtgacgttgcacaatcgcgcccaggcgggtcaacatcccttgctgttgccaggcgtgaccggtcatcaatacatcaatttgttgttgtatcaaattcaggctttgcgcgtcataccacaggcaatctttcagcaaaatgagatcaaccggggcgacagcactgcgaccgctaaaaaaggcgctggcctgcaataagcggatcgcttttttccagcgacgatccgagacataaggcgcatccggtaatttatccagttgctggcgcagcataaaaatcagctcaaatacatgatcgggcagcgtaatttcaccaatctctttctgccagcgttcatattcttcatctgtgatctgcaaggaggcaggaaccggattgtcattttcatcctgttgactggtcagcatggagcggaaattcgctttatcctgcactttatctaaccacagacgaatcagcatgcgatcatataacgcttccagactgctgtctgcttccggcagctcgttggaggccgccaccagcagacgcatcgggattttttctacgagtgcgccgttgcggaactggcgctcgttaatggcggtgagcagggtattaagaattgccggacccgctttccagatctcatccagaaagacgatttcagcttccggcaggtaaccgctggttaaacgttcatagcgcccttcatcttttagcgcctgaatagaaaggggaccaaaaacttcttccggcgtggagaagcgggtcatcagatattcaaacgcgcgggcattctgaaaggcgaattttaagcgccgggcgatcaaacttttggcaatacctggcgggccaaggaggaacacactttcaccacttaatgccgctaataaacacaagcggatggcgtggctacgttcataaagccccttttccaacgaactgctcaggcgggaaattctttccgctaataaatgagggtgagccataatgaagtggcgtcctttcgtcaaaagttctgcgtaaattgcgagtatagacgtttcttgctggtggctaaaatagtctcaaaggaggggtatttttctttgagccaggttaatgtggccgcatttaggagtacgattttgccgttaatcgtgcatactgtgcgcttttttgtgggccaagggactaagcacacatttcatatttcaacgaaagactagtctatgagcactgataataagcaatcattgcccgcgattaccctcgcggcgattggagttgtctacggcgatattggtaccagcccgttatatacacttcgtgaatgtttgtccggccagtttggttttggcgttgaacgcgatgccgtgtttggctttttatcgctgatcttctggctgctaatctttgtggtttccattaaatatctcaccttcgtgatgcgggcagataacgccggtgaaggggggatcctgacgttgatgtcgcttgccgggcgtaatacgtcggcgcgaaccacatcaatgctggtgattatggggctaatcggcggcagctttttctatggtgaagtcgtcataacacccgctatttcggtgatgtccgccattgaaggtctggaaatcgtcgccccgcagctggatacctggatagttcccctctcaattatcgttctcacattattattcatgattcaaaaacatggcacggctatggtcggtaagctgtttgcgccgatcatgctgacctggtttttgattctggcagggctggggttacgtagcattattgctaacccggaagtgctgcatgcactgaatccgatgtgggcggtgcatttcttccttgaatacaaaacggtttcttttattgcattaggggcagtggtgctgtcgattacgggggtcgaggcgctgtatgctgatatggggcactttggtaagttccctattcgtctggcgtggttcaccgtcgtattgccttccttaacccttaattacttcggccagggagcgctgttgttaaagaatccggaagcgattaagaacccgttcttcctgttggcaccggactgggcgctgatcccgctgctgatcatcgccgcactggcgacggtaattgcctcgcaggcggttatctctggcgtcttctcattgacgcgtcaggcggtacgtctgggatatttgtcgccgatgcgcattattcacacttccgaaatggagtcagggcaaatctatattccctttgtgaactggatgctctatgtcgcggtcgtgattgtgattgtcagctttgagcactccagcaacctggcggcggcgtacgggattgcggtgaccggaaccatggtgctgacgtctattctctcgactaccgtggcacgtcagaactggcactggaataagtattttgttgcgctgatcctgattgctttcctttgtgtcgatattcccttgttcaccgctaacctcgataaactgctctccggcggctggttgccattgagcctcggtacggtgatgtttatcgtgatgaccacctggaagagcgagcgtttccgcttgctgcggcggatgcatgaacatggtaactctctggaagcgatgattgcttcgctggagaaatcaccgcccgttcgcgtgcccgggaccgcggtgtatatgtcgcgtgcaatcaacgtcattccctttgcgctgatgcataacctgaaacataacaaggtattgcatgagcgggtgattctgttaactctgcgcaccgaagacgcgccatatgtccataacgtccgtcgggtacagattgaacaactgtcgcccactttctggcgcgtggtggcaagttatggttggcgagaaacgccaaacgtggaagaagttttccaccgctgcggtctggaaggattaagttgccggatgatggaaacctccttctttatgtcgcatgagtcgttgatcctcggcaaacgcccgtggtatttgcgtctgcgcggcaagctgtacttgctgctgcaacgtaatgcgctgcgggcaccggatcaatttgaaatcccgccaaacagagttatcgaactgggtactcaggtcgaaatctaacgccagacgcctcctttctccataagggggcgtttttgttttcatggttaatcaccatgtaaaacgtttcgaggttgatcacatttccgtaacgtcacgatggttttcccaactcagtcaggattaaactgcgggtcagcgaaacgtttcgctgatggagaaaaaaatgaaaaaaggcaccgttcttaattctgatatttcatcggtgatctcccgactgggacataccgatacgctggtggtgtgtgatgctggtttacccatccccaaaagtacaacgcgtatcgatatggcattaacccagggtgtaccttcttttatgcaggtgctgggtgtagtcacaaatgaaatgcaggtcgaggctgtcattatcgcggaagagatcaaacaacataatccgcaactccacgaaacgttgctcactcaccttgagcagctgcaaaaacaccagggaaacaccattgaaattcgttacaccacgcatgaacaattcaaacaacaaaccgcagaaagtcaggcggtaattcgcagcggagaatgttctccgtatgcgaatatcattctctgtgctggcgtgacgttctgaggccgtcatggaagcattacttcagcttaaaggcatcgataaagccttcccgggcgtaaaagccctctcgggcgcagcgttaaatgtctatccgggccgcgtgatggcgctggtgggcgaaaacggcgcgggtaaatccaccatgatgaaagtgcttactggtatctatactcgcgatgccggtacgcttttatggttggggaaagaaacgacatttaccgggccgaaatcttcccaggaagccgggattgggattatccaccaggaactgaacctgatcccgcagttaaccattgccgaaaacattttcctcggtcgtgagtttgttaatcgctttggcaaaattgactggaaaaccatgtatgccgaagcggataaattgctggctaaacttaacctgcgctttaaaagcgacaagctggtgggcgatctttccatcggtgaccagcaaatggttgaaatcgccaaagtgctgagctttgagtcgaaagtcatcattatggatgaaccgaccgatgcgctgaccgataccgaaaccgaatccttgttccgcgtcatccgcgagctgaaattgcaaggccgcggtattgtctatatctcccaccgcatgaaagaaatcttcgagatttgcgatgacgttaccgtttttcgtgacggacaatttattgctgagcgcgaagtggcatcactgaccgaagattctctgattgagatgatggtgggccgcaagctggaagatcaatatccgcacctggacaaagcgccgggagatatccgcctgaaagtcgataatctctgcggacctggcgttaacgatgtctcttttactttacgcaaaggcgaaattcttggcgtctctggtttgatgggcgctgggcgtaccgaactgatgaaagtgctctacggtgcactgccgcgcacaagcggttacgtcaccctggatgggcatgaagtcgttacccgttcgccgcaggatggcctggcaaacggcattgtttatatctccgaagaccgtaaacgtgacggtttagtgctgggcatgtcagtaaaagagaacatgtcgctgaccgcgctgcgctacttcagccgcgctggcggcagtttgaagcatgccgatgaacagcaggctgtgagtgatttcattcgtctgtttaatgtgaaaacgccatcgatggaacaggcaattggtctgctttccggtggcaatcagcaaaaagtagcgattgcccgtggtctgatgacacgccctaaagtgttgatcctcgatgagcctacccgtggcgtagatgtcggcgcgaaaaaagagatctatcaactgattaaccagttcaaagccgatggcttgagcatcattctggtgtcatcggagatgccagaagtattaggcatgagcgatcgcatcatcgtcatgcatgaagggcatctcagcggggaatttactcgtgagcaggccacccaggaagtgttaatggctgccgctgtgggcaagcttaatcgcgtgaatcaggagtaaaaaaatgacaacccagactgtctctggtcgccgttatttcacgaaagcgtggctgatggagcagaaatcgcttatcgctctgctggtgctgatcgcgattgtctcgacgttaagcccgaactttttcaccatcaataacttattcaatattcttcagcaaacctcggtgaacgccattatggcggtcgggatgacgctggtgatcctgacgtcgggtatcgacttgtcggtaggttctctgttggcgctgaccggcgcagttgctgcatctatcgtcggcattgaagtcaatgcgctggtggctgtcgctgccgctctcgcgttaggtgccgcaattggtgcggtaactggggtgattgtagcgaaaggtcgcgtccaggcgtttatcgctacgctggttatgatgcttttactgcgcggcgtgaccatggtttataccaatggtagcccagtgaataccggctttactgagaacgccgatctgtttggctggtttggtattggtcgtccgctgggcgtaccgacgccagtctggatcatggggattgttttcctcgcggcctggtacatgctgcatcacacgcgtctggggcgttacatctacgcgctgggcggcaatgaagcggcaacgcgtctttctggtatcaacgtcaataaaatcaaaatcatcgtctattctctttgtggtctgctggcatcgctggccgggatcattgaagtggcgcgtctctcctccgcacaacccacggcggggactggctatgagctggatgctattgctgcggtggttctgggcggtacgagtctggcgggcggaaaaggtcgcattgttgggacgttgatcggcgcattaattcttggcttccttaataatggattgaatttgttaggtgtttcctcctattaccagatgatcgtcaaagcggtggtgattttgctggcggtgctggtagacaacaaaaagcagtaataacgactacaggacatcttgaatatgaacatgaaaaaactggctaccctggtttccgctgttgcgctaagcgccaccgtcagtgcgaatgcgatggcaaaagacaccatcgcgctggtggtctccacgcttaacaacccattctttgtatcgctgaaagatggcgcgcagaaagaggcggataaacttggctataacctggtggtgctggactcccagaacaacccggcgaaagagctggcgaacgtgcaggacttaaccgttcgcggcaccaaaattctgctgattaacccgaccgactccgacgcagtaggtaatgctgtgaagatggctaaccaggcgaacatcccggttatcactcttgaccgccaggcaacgaaaggtgaagtggtgagccacattgcatctgataacgtactgggcggcaaaatcgccggtgattacatcgcgaagaaagtgggtgaaggtgccaaagttatcgagctgcaaggcattgccggtacatccgcagcccgtgaacgtggcgaaggtttccagcaggccgttgctgctcacaagtttaatgttcttgccagccagcctgcagattttgatcgcaccaaaggtttgaacgtaatgcagaacctgttgaccgctcatccggatgttcaggctgtattcgcgcagaatgatgaaatggcgcttggcgcgctgcgcgcactgcaaactgccggtaaatcggatgtgatggtcgtcggatttgacggtacaccggatggcgaaaaagcggtgaatgatggcaaactagcagcgactatcgctcagctacccgatcagattggcgcgaaaggcgtcgaaaccgcagataaagtgctgaaaggcgagaaagttcaggctaagtatccggttgatctgaaactggttgttaagcagtagttttaatcaggttgtatgacctgatggtgacataaatacgtcatcgacagatgaacgtgtaatataaagaaaagcagggcacgcgccaccctaacacggtggcgcattttatggacatcccgaatatgcaaaacgcaggcagcctcgttgttcttggcagcattaatgctgaccacattcttaatcttcaatcttttcctactccaggcgaaaccgtaaccggtaaccactatcaggttgcatttggcggcaaaggcgcgaatcaggcggtggctgctgggcgtagcggtgcgaatatcgcgtttattgcctgcactggcgatgacagcattggtgagagcgttcgccagcagctcgccactgataacatcgatatttctccggtcagcgtgatcaaaggcgaatcaacaggtgtggcgctgatttttgttaatggcgaaggtgagaatgtcatcggtattcatgccggcgctaatgctgccctttccccggcgctggtggaagcgcaacgtgagcgtattgccaacgcgtcagcattattaatgcagctggaatcaccactcgaaagtgtgatggcagcggcgaaaatcgcccatcaaaataagactatcgttgcgcttaacccggctccggctcgcgaacttcctgacgaactgctggcgctggtggacattattacgccaaacgaaacggaagcagaaaagctcaccggtattcgtgttgaaaatgatgaagatgcagcgaaggcggcgcaggtactgcatgaaaaaggtatccgtactgtactgattactttaggaagtcgtggtgtatgggctagcgtgaatggtgaaggtcagcgcgttcctggattccgggtgcaggctgtcgatactattgctgccggagatacctttaacggcgcgttaatcacggcgttgctggaagaaaaaccattgccagaggcgattcgttttgcccatgcagccgctgcgattgccgtaacacgtaaaggcgcacaaccttccgtaccgtggcgtgaagagatcgacgcatttttagacaggcagaggtgacgcttggctacaatgaaagatgttgcccgcctggcgggcgtttctacctcaacagtttctcacgttatcaataaagatcgcttcgtcagtgaagcgattacagccaaagttgaagcggcgattaaagaactcaattacgcgccatcagctctggcgcgtagcctcaaactcaatcaaacacataccattggcatgttgatcactgccagtaccaatcctttctattcagaactggtgcgtggcgttgaacgcagctgcttcgaacgcggttatagtcttgtcctttgcaataccgaaggcgatgaacagcggatgaatcgtaatctggaaacgctgatgcaaaaacgcgttgatggcttgctgttactgtgcaccgaaacgcatcagccttcgcgtgaaatcatgcaacgttatccgacagtgcctaccgtgatgatggactgggctccgttcgatggcgacagcgatcttattcaggataactcgttgctgggcggagacttagcaacgcaatatctgatcgataaaggtcatacccgtattgcctgtattaccggtccgctggataaaactccggcgcgcctgcggttggaaggttatcgggctgcgatgaaacgtgcgggtctcaacattcctgatggctatgaagtcactggtgattttgaatttaacggcgggtttgacgctatgcgccaactgttatcacatccgctgcgtcctcaggccgtctttaccggaaatgacgctatggctgttggcgtttaccaggcgttatatcaggcagagttacaggttccgcaggatatcgcggtgattggctatgacgatatcgaactggcaagctttatgacgccaccattaacaactatacaccaaccgaaagatgaactgggggagctggcgattgatgtactcatccatcggataacccagccgaccctacagcaacaacgatttgaagtggtttactgaatttggccacctgaacagaggtgatatgctcacctcagaacaacacaggtgccataatgaaaaaaagaaatttcagcgcagagtttaaacgcgaatccgctcaactggtcgttgaccagaattacaccgtggcagatgcagccagcgctatggatgtcggcctttccacaatgacgcgatgggtgaaacaattacgtgatgagcggcagggaaaaacaccaaaagcctcccctattaccccggaacaaattgaaatccgtgagctcaggaaaaagctacaacgtattgaaatggaaaatgaaatattaaaaaaggctaccgcgctcttgatgtcagactccctgaacagttctcgataatcgggaaactcagggcgcgttatcctgtggccactctctgccatgtgttcggggtccatcgcagcagctacaaatactggaaaaaccgtcctgaaaagccagacggcagacgggctgtattacgcagccaggtacttgaactgcatggcatcagccacggctctgccggagcaagaagcatcgccacaatggcaacccagagaggctaccagatggggcgctggcttgctggcagactcatgaaagagctggggctggtcagctgtcagcagccgacttaccggtataaacgtggtggtcatgaacatgttgctatccctaactaccttgaacggcagttcgccgtgaccgagccaaatcaggtgtggtgcggtgatgtgacctatatctggacgggtaagcgctgggcgtacctcgccgttgttctcgacctgttcgcaagaaaaccagtgggctgggccatgtcgttctcgccggacagcaggcttaccatgaaagcactggaaatggcatgggaaacccgtggtaagcccgtcggggtgatgttccacagcgatcaaggcagtcattatacgagcaggcagttccggcagttactgtggagataccggatcaggcagagtatgagtcggcgtggaaactgctgggataacagcccaatggagcgcttcttcaggagtctgaagaacgaatgggtgccggcgacgggctatgtaagcttcagcgatgcagctcacgcaataacggactatatcgttggatattacagcgcactaagaccgcacgaatataatggtgggttaccaccaaacgaatcggaaaatcgatactggaaaaaactctaactcggtggccagtttttgttgaccacttcaattacaacttactccgattctgatggaacgtggttcggcttagatttacgctgtcttttgatcaaattattaccatcggttgttttcagtagcatgaacattgctgctgaagcaacagtaataatgcccatcgtgataaacgtatagtggaattgttcgactgtcgttgtgccttccatcccttcgtaaacgcgaaggactgccgcacttacagcaacgcctaaactgatcgacagttgctgcgtgaccgccagaacactgttaccgctgctggcgttgtcatcggtcagatcggcaagtgtgatggtattcatcgcggtaaattgtgtcgacatagccatccctaatataaacaacggcaagatcagcatccatatcgccattgctggtgattgcaaagagaactgagcgatcattagccctataatcaccgtgatccccactaacgtatggcgatagcccagacgacgtaagacttgggtaaccatcgattttgcaataatggaacctaacgctgtcggtgccatcatacagccagcaataaacgcctgatacccaaatcctacctgtaacatcaatggcataaggaacggtacacagccggtccccagacgggttgcaatattgcctacgataccgatcgagaaagtgcgggttttaaataaatctaatgaaattaatgggtttggcgtgcgtcgcgcatggagaatatagagaagcagtaacccgatgctggtgacaattaccgtcaaggcaatccagctggcgacaatcttttccccgaatagctctattccgcttgagaagagaacaaggctgaggccaaacagcaaaaagccagtggtatcgaatctgcgtcgtgcggtggtgaaattgggcatatgtttgtgcgcgtaaagaaggcccgcaatacctatggggatattgattaaaaatatccagtgccaggttgcccaggtgaccagcacgccgccaagaacggggcctaaaattggccccaccagacccggcatggcgacaaaattcaatacaggaagaagctcattacgaggataagcgcgcagtaaggccagccgagcaacaggcatcatcattgcgccgcctatcccctgaataacccggaagacaaccagctgtggtagcgagttagaaagtgcgcaggccagagaacccaacgtgaacagactcacggcaagggtaaatatgcgacgcgtaccgaagcgatcggctagccatccgcttaccggaataagcatcgccaccgtcagcgtataactgatgatggctgattgcatcgcgagaggagaacgattaaggctatgagcgattgcgggtaaggcggtattcagaatagtggcatcaagtgcctgcatgaagaaggccatcgccgcgatccacggcaaacccgccatactgcgcttctttttatcgctcattcaatgtcctgttatcgagttatcacttatctggtgagcgtagcagcgcctgacaagctttaaatgccgcgtcgccatcgctttggataatcgcatcgacaatcgcctggtgcagatccagctttatcactgtgtcgctggtaattgacgtgaagtaagtgtgataaaccgaatggaatagcgaggcgaatgaggtcaaaaacggattggcgctcatttcatagatatgctcatgccaggccatatcgacttcgatccagcgttcacggcgaaagttctcttttaatgccgccatttcggccattaacgtattgagatgcgccttctgttccgcggtgccaacctttgctgccagtaggcaagcttgcggctccagacagatacgcataaccagaaagtgatcgatgacctgatgaaagttctcttctgtcatccaccaggtaagcaattcctgatcaagaaaattccagttcgattgtggcatgactcgggtaccaattcgcggtcgcggtaaaaccatcccttttgccgttaacgttttgaccgcttcgcgtaccgctgtacgactcactccaaattgctcgcccagctcaatctcaccaggcaaaatggtgccgggttcatattcaccttttaagatccgctgcgccagcttctcagccagaacatacgaaaggtttttctgtgcagctaactgttgtgcgcttaaaggcattactaatcttcctttttctttttattccttcttagtatgccaccaggaagtgtgattacggttgcaaaaacggcaaattgcttgttttatggcacattaacggggcttttgctgaaaaaatgcgcgatcagaaaattattttaaatttcctcttgtcaggccggaataactccctataatgcgccaccactgacacggaacaacggcaaacacgccgccgggtcagcggggttctcctgagaacttcggcagggaaagcaaaataaatgcttgactctgtagcgggaaagcgtattatgcacaccccgcgccgttgagaaaaagcgaagcggcactgctctttaacaatttatcagacaatctgtgtgggcactcgaagatacggattcttgacgtcgcaagacgaaaaatgaataccaagtctcaagagtgaacacgtaattcattacgaagtttaattctttgagcatcaaacttttaaattgaagagtttgatcatggctcagattgaacgctggcggcaggcctaacacatgcaagtcgaacggtaacagaaagcagcttgctgctttgctgacgagtggcggacgggtgagtaatgtctgggaaactgcctgatggagggggataactactggaaacggtagctaataccgcataacgtcgcaagaccaaagagggggaccttcgggcctcttgccatcggatgtgcccagatgggattagctagtaggtggggtaaaggctcacctaggcgacgatccctagctggtctgagaggatgaccagccacactggaactgagacacggtccagactcctacgggaggcagcagtggggaatattgcacaatgggcgcaagcctgatgcagccatgccgcgtgtatgaagaaggccttcgggttgtaaagtactttcagcggggaggaagggagtaaagttaatacctttgctcattgacgttacccgcagaagaagcaccggctaactccgtgccagcagccgcggtaatacggagggtgcaagcgttaatcggaattactgggcgtaaagcgcacgcaggcggtttgttaagtcagatgtgaaatccccgggctcaacctgggaactgcatctgatactggcaagcttgagtctcgtagaggggggtagaattccaggtgtagcggtgaaatgcgtagagatctggaggaataccggtggcgaaggcggccccctggacgaagactgacgctcaggtgcgaaagcgtggggagcaaacaggattagataccctggtagtccacgccgtaaacgatgtcgacttggaggttgtgcccttgaggcgtggcttccggagctaacgcgttaagtcgaccgcctggggagtacggccgcaaggttaaaactcaaatgaattgacgggggcccgcacaagcggtggagcatgtggtttaattcgatgcaacgcgaagaaccttacctggtcttgacatccacggaagttttcagagatgagaatgtgccttcgggaaccgtgagacaggtgctgcatggctgtcgtcagctcgtgttgtgaaatgttgggttaagtcccgcaacgagcgcaacccttatcctttgttgccagcggtccggccgggaactcaaaggagactgccagtgataaactggaggaaggtggggatgacgtcaagtcatcatggcccttacgaccagggctacacacgtgctacaatggcgcatacaaagagaagcgacctcgcgagagcaagcggacctcataaagtgcgtcgtagtccggattggagtctgcaactcgactccatgaagtcggaatcgctagtaatcgtggatcagaatgccacggtgaatacgttcccgggccttgtacacaccgcccgtcacaccatgggagtgggttgcaaaagaagtaggtagcttaaccttcgggagggcgcttaccactttgtgattcatgactggggtgaagtcgtaacaaggtaaccgtaggggaacctgcggttggatcacctccttaccttaaagaagcgtactttgcagtgctcacacagattgtctgatagaaagtgaaaagcaaggcgtcttgcgaagcagactgatacgtccccttcgtctagaggcccaggacaccgccctttcacggcggtaacaggggttcgaatcccctaggggacgccacttgctggtttgtgagtgaaagtcacctgccttaatatctcaaaactcatcttcgggtgatgtttgagatatttgctctttaaaaatctggatcaagctgaaaattgaaacactgaacaacgagagttgttcgtgagtctctcaaattttcgcaacacgatgatgaatcgcaagaaacatcttcgggttgtgaggttaagcgactaagcgtacacggtggatgccctggcagtcagaggcgatgaaggacgtgctaatctgcgataagcgtcggtgaggtgatatgaaccgttataaccggcgatttccgaatggggaaacccagtgtgtttcgacacactatcattaactgaatccataggttaatgaggcgaaccgggggaactgaaacatctaagtaccccgaggaaaagaaatcaaccgagattcccccagtagcggcgagcgaacggggaggagcccagagcctgaatcagtgtgtgtgttagtggaagcgtctggaaaggcgtgcgatacagggtgacagccccgtacacaaaaatgcacatattgtgagctcgatgagtagggcgggacacgtggtatcctgtctgaatatggggggaccatcctccaaggctaaatactcctgactgaccgatagtgaaccagtaccgtgagggaaaggcgaaaagaaccccggcgaggggagtgaaaaagaacctgaaaccgtgtacgtacaagcagtgggagcctcttaatggggtgactgcgtaccttttgtataatgggtcagcgacttatattctgtagcaaggttaaccgaataggggagccgaagggaaaccgagtcttaactgggcgttaagttgcagggtatagacccgaaacccggtgatctagccatgggcaggttgaaggttgggtaacactaactggaggaccgaaccgactaatgttgaaaaattagcggatgacttgtggctgggggtgaaaggccaatcaaaccgggagatagctggttctccccgaaagctatttaggtagcgcctcgtgaattcatctccgggggtagagcactgtttcggcaagggggtcatcccgacttaccaacccgatgcaaactgcgaataccggagaatgttatcacgggagacacacggcgggtgctaacgtccgtcgtgaagagggaaanaacccanaccnccagcnaaggtccnaaannnnngntnannnggnaannnnnnnggnangnccnnnnnnncnngnnnntngnntnnnannnnncnnnnnttnaannaannnnnannnnnnnnnngnnnnnnnngncnnnnnngnannnnnnanngggnnnaannnnnnnncnnannnnnngnnnnnnnnnnnnnnnntnnnnggnnngggnnnnntnnnnnanncnnnnnnngnngncnnnnnnggnnnnnngnngnnnnnnnnnnnnnnannnnnnnnnnannnannnnnaannnggnnnaaangcccgctcgccggaagaccaagggttcctgtccaacgttaatcggggcagggtgagtcgacccctaaggcgaggccgaaaggcgtagtcgatgggaaacaggttaatattcctgtacttggtgttactgcgaaggggggacggagaaggctatgttggccgggcgacggttgtcccggtttaagcgtgtaggctggttttccaggcaaatccggaaaaccaaggctgaggcgtgatgacgaggcactacggtgctgaagcgacaaatgccctgcttccaggaaaagcctctaagcatcaggtaacatcaaatcgtaccccaaaccgacacaggtggtcaggtagagaataccaaggcgcttgagagaactcgggtgaaggaactaggcaaaatggtgccgtaacttcgggagaaggcacgctgatatgtaggtgaagcgacttgctcgtggagctgaaatcagtcgaagataccagctggctgcaactgtttattaaaaacacagcactgtgcaaacacgaaagtggacgtatacggtgtgacgcctgcccggtgccggaaggttaattgatggggttagcggcaacgcgaagctcttgatcgaagccccggtaaacggcggccgtaactataacggtcctaaggtagcgaaattccttgtcgggtaagttccgacctgcacgaatggcgtaatgatggccaggctgtctccacccgagactcagtgaaattgaactcgctgtgaagatgcagtgtacccgcggcaagacggaaagaccccgtgaacctttactatagcttgacactgaacattgagccttgatgtgtaggataggtgggaggctttgaagtgtggacgccagtctgcatggagccgaccttgaaataccaccctttaatgtttgatgttctaacgttggcccgtaatccgggttgcggacagtgtctggtgggtagtttgactggggcggtctcctcctaaagagtaacggaggagcacgaaggttggctaatcctggtcggacatcaggaggttagtgcaatggcataagccagcttgactgcgagcgtgacggcgcgagcaggtgcgaaagcaggtcatagtgatccggtggttctgaatggaagggccatcgctcaacggataaaaggtactccggggataacaggctgataccgcccaagagttcatatcgacggcggtgtttggcacctcgatgtcggctcatcacatcctggggctgaagtaggtcccaagggtatggctgttcgccatttaaagtggtacgcgagctgggtttagaacgtcgtgagacagttcggtccctatctgccgtgggcgctggagaactgaggggggctgctcctagtacgagaggaccggagtggacgcatcactggtgttcgggttgtcatgccaatggcactgcccggtagctaaatgcggaagagataagtgctgaaagcatctaagcacgaaacttgccccgagatgagttctccctgactccttgagggtcctgaaggaacgttgaagacgacgacgttgataggccgggtgtgtaagcgcagcgatgcgttgagctaaccggtactaatgaaccgtgaggcttaaccttacaacgccgaagatgttttggcggatgagagaagattttcagcctgatacagattagattaaccggcgacaagcgggttaatggaacagaatttgcctggcggccttagcgcggtggtcccacctgaccccatgccgaactcagaagtgaaacgccgtagcgccgatggtagtgtggggtctccccatgcgagagtagggaactgccaggcatcaaatttagcagtaagccggttataaaccggtggttgtaaaagaattcggtggagcggtagttcagtcggttagaatacctgcctgtcacgcagggggtcgcgggttcgagtcccgtccgttccgccaccctaattaggggcgtagttcaattggtagagcaccggtctccaaaaccgggtgttgggagttcgagtctctccgcccctgccagaaatcatccttagcgaaagctaaggattttttttatctgaaataaccctctccgaagtaactccttctaccggcatccttgccagccattcagattaatacacttcatccagcacgttaattttcaatagatcgcgaatcaacgcatttttatcgctattttgtagccatatggcataaagcggccgtgaaagtgttgtgctatcgacaacggtatgcaggccgccttttttacgtgcccaactgacgggtagccaggtgcaaccattaagcatcgcaatctgttgctgtgccagttcagcagaactggttgtcagaatgggaacttcgtcagcaccgatcaaacctgcctcatgctgttgaaaatctggcccccactctagtcgcagatagttaagatctccctttagtttagaaggggcactggtataaagcgctaaagtgaaataccccagcaactgactacaaaattcgtccattttgggggcttcagttgtaataagaagatcaagttggcgttcatgcaactgttttaccagagactgccgttgggcaattcgcgcttcgaactgtaagcctgtatggacatcctgattttgatacaagcgtcccagccactgattaagcatacactcccacagcgaggcgctggcaccgatagaaaactcattatgtcgtgaggtatgcgccacctccttgcgggcggcctgccaggtgctcatgagcgtttctgcataaggcagaagcttttctccggcagcggttaaacggatattgtttctgtggcgggtgaaaagattcacacccagttgattttccagttgtctgattcgaaagctcacggctgattgggtcagatagagcgattcagccgctcgaccaaagtgacgcgttcggctaacttccaggaaagtttttaacaattccgtatccacagtgctctccgcaaaattatttgtcgttatgatttaaatgttttgttttacactctgtcaagcgtaactaatactccgcgccataactagctcggtcaaagaattaggagcgtgcaggatggcggaaagctttacgacgactaatcgatatttcgacaataaacattatccacgtggattctctcgtcatggtgacttcaccatcaaagaggcacaactgcttgagcgtcatggttatgccttcaatgagttggatcttggcaaacgcgagccggttaccgaggaagagaaactcttcgtagcagtatgccgtggcgaacgtgaaccagtgacagaagcagaacgcgtgtggtccaagtatatgacgcgtatcaagcgtccaaaacgttttcacaccctttccggcggtaaaccgcaggttgaaggtgctgaagactacaccgattctgacgattaataaaaagggcgaaatgccctttttttatgtcagtagtttttgcagatggatgagcaaacggtcaatcgcacgatagctaactgcctcctgcaaatgctgacgtgtgataatgtcagactgatcaatatcagcaatggttcgtgcaactttcaataaccgctgccaggcacgaatcgataaccccagatggatcagcgtttcttccagccactgcgcatcttcgctttcaagcttgcagaattggcgtatttccggattatccagccaggcgttcagtttattctgccgcttaaattggcgctctctggcggccattacacgttgtttaacggtggtgctgttttctcccggcactaccgttttactcaaaatgccggggggcggtaatgggatctccagtgagagatcgaagcggtcgagaaagggccccgagagccggttgagataacgtaatgtctgttctggtgtgcagcggttatggtttccctgataatgtccggtagggctgggattcattgccgcgacaagctggaaacgggctggataggttatttttgctcgtgtgcgtgaaagatggatctgcccggattcaatcggctctcgcaaggcatccagtgtacgccgttcaaattcaggtagctcatcaagaaaaagcacgccgttatgcgccagcgaaatttcacctggccctggaattgcaccaccgcccaccatcgcagttaacgacgcactgtgatgaggtgagcggaacgggcgctgccgccattgtttttgtactgattcagcatttaccagacttaatatcgcagcgctctccagtgcctcttcattgcttaaatctggcaaaaggccattaatacggctggcgagcattgttttacctgttcccggcggtccaatcagtaaaaggttgtgcccgccagcggcggtaatttccagtcctcgctttccttgctcctgaccgacaacatcactgagatcatgttgtagcgcccgggatactgcattagttggtttcgggtgttcgagagcgtgcttaccttccagaaacgcgcagacagcctgcagatgatcggctatcaggcatccttcaccgttaattagccccacttcatcttcgttatctttcgcgacgataatttttctgcccgacttaatagcttcagttgcactggagattgcgccgggaacgccacgcagagcgcctgtaagcgccagttctccgactaattcatattcatctaacttattggctgtaagctgttctgaggccgccagtaacgcaatagcgataggcaaatcatatcgtcccccttcttttggcagatcggctggagcaaggttgatggtgatttttttcgccggatattcatatccgctattgataatggcgctgcgcacgcgatcgcgagcttcttttaccgttgtttctggtaagcccaccatcgttaagcctggtagacctttactgatatgtacctcaacagtgattgggggcgcatttactcccagggctgcgcgggtatgaacaattgacagtgacataagccctccttgagtcaccattatgtgcataagatatcgctgctgtagcccgctaattcgtgaattttagtggctgattcctgtttatttgtgcaagtgaagttgagttgttctggcggtggaatgatgctcgcaaaaatgcagcgtgcaaaggatgaactacgaggaagggaacaacattcatactgaaattgaatttttttcactcactattttctttttaaaaaacaacaatttctcttgaaattattaaagacatcataaaaatcggccaaaaaatatcttgtgctattcgcaaaatctatggtaactctttaggcattccttcgaacaagatgcaagaaaagacaaaatgacagcccttctacgagtgattagcctggtcgtgattagcgtggtggtgattattatcccaccgtgcggggctgcacttggacgaggaaaggcttagagatcaagccttaacgaactaagacccccgcaccgaaaggtccgggggttttttttgaccttaaaaacataactgaggagcagacaatgaataacagcacaaaattctgtttctcaagattcaggacggggaactaactatgaatggcgcacagtgggtggtacatgcgttgcgggcacagggtgtgaacaccgttttcggttatccgggtggcgcaattatgccggtttacgatgcattgtatgacggtggcgtggaacacttgctgtgccgacacgagcaaggtgcagcaatggcggctatcggttatgcccgtgctaccggcaaaactggcgtttgcatcgccacgtctggtccaggtgcaaccaacctgataaccgggcttgcggacgcgctgttagattccatccccgttgttgctatcaccggtcaggtatccgcaccgtttatcggcactgacgcatttcaggaggtggatattctggggttgtcgttagcctgcaccaagcacagtttcctggtgcaatcactggaagagttaccgcgtatcatggccgaagcgtttgacgtcgccagctctggtcgtcctggtccggttttggtcgatattccaaaagatatccagttagccagcggcgatctggaaccgtggttcaccactgttgaaaacgaagtgactttctcacatgccgaagtcgagcaagcgcgtcagatgctggcaaaagcgcaaaaaccgatgctgtacgttggcggtggcgtgggcatggcgcaggcagtttcggctttgcgtgaatttctcgctgccacaaaaatgcctgccacctgtacgttgaaagggctgggcgcagtagaagcagattatccgtactatctgggcatgctggggatgcacggcaccaaagcggcgaacttcgcagtgcaggagtgcgatctactgatcgccgtgggcgcacgttttgatgaccgggtgactggcaaactgaacaccttcgcaccacacgccagcgttatccatatggatatcgatccggcagaaatgaacaagctgcgtcaggcacatgtggcattacagggtgatttaaatgctctgttaccagcattacagcagccgttaaatatcgatgactggcagcaacactgcgcgcaactgcgtgatgaacatgcctggcgttacgaccatcctggtgacgctatctacgcgccgttgttgttaaaacaactgtcggatcgtaaacctgcggattgcatcgtgaccacagatgtggggcagcaccagatgtgggctgcccagcacatcgtccacactcgcccggaaaacttcatcacctccagcggcttaggcaccatgggtttcggtttaccggcggcggttggcgcacaagtcgcgcgaccgaacgatactgtcgtctgtatctccggtgacggctctttcatgatgaatgtgcaagagctgggcaccgtaaaacgcaagcagttaccgttgaaaatcgtcttactcgataaccaacggttagggatggttcgacaatggcagcaactgtttttccaggaacgatacagcgaaaccacccttaccgataaccccgatttcctcatgttagccagcgccttcggcatccctggccaacacatcacccataaagaccaggttgaagcggcactcgacaccatgctgaacagtgatgggccatacctgcttcatgtctcaatcgacgaacttgagaacgtctggccgctggtgccgcctggtgccagtaattctgaaatgttggagaaattatcatgatgcaacatcaggtcaatgtatcggctcgcttcaatccggaaaccttagaacgtgttttacgcgtggtgcgtcatcgtggtttccacgtctgctcaatgaatatggccgccgccagcgatgcacaaaatataaatatcgaattgaccgttgccagcccacggtcggtcgacttactgtttagtcagttaaataaactggtggacgtcgcacacgttgctatctgccagagcacaaccacatcacaacaaatccgcgcctgagcgcaaaaggaatataaaaatgaccacgaagaaagctgattacatttggttcaatggggagatggttcgctgggaagacgcgaaggtgcatgtgatgtcgcacgcgctgcactatggcacctcggtttttgaaggcatccgttgctacgactcgcacaaaggaccggttgtattccgccatcgtgagcatatgcagcgtctgcatgactccgccaaaatctatcgcttcccggtttcgcagagcattgatgagctgatggaagcttgtcgtgacgtgatccgcaaaaacaatctcaccagcgcctatatccgtccgctgatcttcgttggtgatgttggcatgggcgtaaacccgccagcgggatactcaaccgacgtgattatcgccgctttcccgtggggagcgtatctgggcgcagaagcgctggagcaggggatcgatgcgatggtttcctcctggaaccgcgcagcaccaaacaccatcccgacggcggcaaaagccggtggtaactacctctcttccctgctggtgggtagcgaagcgcgccgccacggttatcaggaaggtatcgcgttggatgtgaatggttacatctctgaaggcgcaggcgaaaacctgtttgaagtgaaagacggcgtgctgttcaccccaccgttcacctcatccgcgctgccgggtattacccgtgatgccatcatcaaactggcaaaagagctgggaattgaagtgcgtgagcaggtgctgtcgcgcgaatccctgtacctggcggatgaagtgtttatgtccggtacggcggcagaaatcacgccagtgcgcagcgtagacggtattcaggttggcgaaggccgttgtggcccggttaccaaacgcattcagcaagccttcttcggcctcttcactggcgaaaccgaagataaatggggctggttagatcaagttaatcaataaatacaaaaaatgggacggcacgcaccgtcccatttacgagacagacactgggagtaaataaagtatgcctaagtaccgttccgccaccaccactcatggtcgtaatatggcgggtgctcgtgcgctgtggcgcgccaccggaatgaccgacgccgatttcggtaagccgattatcgcggttgtgaactcgttcacccaatttgtaccgggtcacgtccatctacgcgatctcggtaaactggttgccgaacaaattgaagcggctggcggcgttgccaaagagttcaacaccattgcggtggatgatgggatcgctatgggccacgggggcatgctttattcactgccatctcgcgaactgatcgctgattccgttgaatatatggtcaacgcccactgcgccgacgccatggtctgcatctctaactgcgacaaaatcaccccggggatgctgatggcttccctgcgcctgaatattccggtgatctttgtttccggcggcccgatggaggccgggaaaaccaaactgtccgatcagatcattaagctcgatctggttgatgcgatgatccagggcgcagacccgaaagtttctgactcccagagcgctcaggttgaacgatccgcctgcccaacctgcggttcctgctccgggatgtttactgctaactcaatgaactgcctgaccgaagcgctgggcctgtcgcagccgggcaacggctcgctgctggcaacccacgctgatcgcaagcaactgttcctcaatgctggtaaacgcattgttgaattgaccaaacgttactacgaacaggatgatgaaagcgcactgccgcgtaacatcgccagtaaggcggcgtttgaaaacgccatgacgctggatatcgcgatgggcggctctaccaacaccgttcttcacctactggcggcggcgcaggaagcggaaatcgacttcaccatgagtgatatcgataagctctcccgcaaagtaccgcagctgtgtaaagttgcgccgagcacccaaaaataccatatggaagatgttcaccgtgctggtggtgttatcggtattctcggcgagctggatcgcgcggggttactgaaccgtgatgtgaaaaacgtacttggcctgacgttgccgcaaacactggaacaatacgacatcgtcgtgacccaggatgatgcggtaaaaaatatgttccgcgctggccctgcgggcattcgtactacacaggcattctcgcaggattgccgctgggatacgctggacgacgatcgctccaatggctgtatccgctcgctggaacacgcctacagcaaagacggcggtctggcggtgctctacggtaatttcgcagaaaacggctgcatcgtgaaaaccgcaggcgtcgatgacagcatcctaaaattcaccggcccggcgaaagtgtacgaaagccaggacgacgcggtagaagcgatcctcggtggcaaagttgtcgcgggcgatgtggtggtgatccgctatgaaggcccgaaaggcggccctggcatgcaggaaatgctctacccaaccagcttcctgaaatcaatggggctcggcaaagcctgtgcgctgatcaccgatggacgcttctccggcggcacctctggtctttccatcggccacgtctcgccggaagcggcaagcggcggcagcattggcctgattgaagatggtgacctgatcgctatcgatattccgaaccgaggcattcagttacaggtaagcgatgccgaactggcggcgcgtcgtgaagcgcaggaagcccgtggcgacaaagcctggacgccgaaaaaacgtgaacgtcaggtttcctttgccctgcgtgcctacgccagcctggcaaccagcgccgacaaaggcgcggtgcgcgataaatcgaaactggggggttaatgatggcagactcacaacccctgtctggtgctccggaaggcgccgaatatttaagagcggtactacgtgcaccggtttacgaggcggcgcaggtcacgccgctacaaaaaatggaaaagctctcgtcgcgtcttgataacgtgattctggtgaagcgcgaagatcgccagccggtacacagctttaagctgcgcggtgcatacgccatgatggcgggcctgacggaagaacaaaaagcgcatggcgtgatcactgcctcggcgggtaatcacgcgcagggcgtcgcgttttcttccgcacggttaggcgtgaaggcgctgatcgtcatgccaaccgccaccgccgatatcaaagttgatgcggtacgcggctttggcggcgaagtgttgcttcatggcgcgaactttgacgaagcaaaagcgaaagcgatcgaactgtcacagcagcagggcttcacctgggtgccaccgttcgaccacccgatggtgatcgctgggcaaggcacgctggcgctggaactgctccagcaggatgcccatcttgaccgcgtgtttgtgccggtcggcggcggcggtctggcggcgggtgtggcggtgctgatcaaacaactgatgccgcaaatcaaagtgatcgccgttgaagcggaagactccgcctgcctgaaagcggcgctggatgcgggtcatcctgtggatctgccgcgcgtggggctgtttgctgaaggcgttgcggtaaaacgcattggcgacgaaaccttccgtttgtgccaggagtatctcgacgacatcatcaccgtcgatagtgatgcgatctgtgcggcgatgaaggatttattcgaagatgtacgtgcggtggcggaaccctctggcgcgctggcgctggcagggatgaaaaaatatatcgcccagcataatattcgcggcgaacgcctggcgcatattctttccggtgccaacgtgaacttccacggcctgcgctacgtctcggaacgttgcgaactgggcgaacagcgtgaagcgttgttggcggtgaccatcccggaagtgaagggcagcttcctcaaattctgccaactgcttggcgggcgctcggtcaccgagttcaactaccgttttgccgatgccaaaaacgcctgcatttttgttggcgtgcgcctgagccgcggcctcgaagagcgcaaagaaattttgcagatgctcaacgatggcggctacagcgtagtggatctctccgacgacgaaatggcgaagctgcatgtgcgctatatggtcggcgggcgtccgtcgcatccgttgcaggaacgcctctacagcttcgaattcccggaatcgccgggcgcgctgttgcgcttcctcaacacgctgggtacgcactggaacatttctttgttccactatcgcagccatggcaccgactacgggcgcgtactggcggcgttcgaacttggcgaccatgaaccggatttcgaaacccggttgaatgagttgggttacgattgccacgacgaaaccaataacccggcgttcaggttctttttggcgggttaatggttcggcaaaatcttccagaatgcctcaatcagcggctcatgtagccgctttttctgcacacacacgcccagttcaaacggcgttttttcatcactgcgctctaaaatcatcacgcggttacgcaccggttccgggctgttttccagcaccacttccggcaacaaggctacgccacagccgagcgctaccatcgacaccatcgcttcatgcccgccgaccgtagcgtaaatcatcgggttgctgattttgttgcgtcgaaaccacagttcaatgcgccggcgcaccggtccctgatcggccatgataaacggcactgtagaccagtccggcttatctgccgaaacttggttacgcaccgggcagggtagcgcaggggcaatcagcactactgccagattctccagcatcgaaaatgccactgcgccgggcagagtctccggtttcccggcaatcgccagatccgcttcgccagtgacgaccttttccatcgcatctgccgcatcaccagtcgtgagtttaatctccaccgacgggtgttccgcgcggaagcgatcgagaatcggcggcagatggctgtaggcagcggtcaccgagcagaagatatgtaattcgccagagagcgacggtccttgctgatcgatggtgtggcgcagctgttgatactgcaacagcgtttgctgggcgaaaacgcgcagttcttcgcccgcttccgtcagcgttaccgtgcggttatcacgcacaaacagcggctgaccgagatcttcttccaggcgctgtatttgtcgcgaaagcgtagacgggctaacgtgcattgcccgcgcgctgcggccaaaatggcggctttccgccagatgcaggaaggttttcagatcgcgtaaatccaatggcgcagcccttaatgttgacgttgcagaaattgcaatgtgacgttgtgaatatatcaatttccgcaataaatttcctgtcatatagtgaattcaatctcgcaaacgcgaaccgaacaataagaagcacaacatcacgaggaatcaccatggctaactacttcaatacactgaatctgcgccagcagttggcacagctgggcaaatgtcgctttatggggcgcgatgaattcgccgatggcgcgagctaccttcagggtaaaaaagtagtcatcgtcggctgtggcgcacagggtctgaaccagggcctgaacatgcgtgattctggtctcgatatctcctacgctctgcgtaaagaagcgattgctgagaagcgcgcatcctggcgtaaagcaaccgaaaatggttttaaagtgggtacttacgaagaactgatcccgcaggcggatctggtggttaacctgacgccggacaagcagcactctgatgtagtgcgcaccgtacagccactgatgaaagacggcgcggcgctgggctactctcatggtttcaatatcgtagaagtgggtgagcagatccgtaaagacatcaccgtcgtaatggttgcgccgaaatgccctggcaccgaagtacgtgaagagtacaaacgtggattcggcgtaccgacgctgattgccgttcacccggaaaacgatccgaaaggcgaaggcatggcgatcgctaaagcatgggcggctgcaaccggcggtcaccgtgcgggcgttctggaatcctctttcgttgcggaagtgaaatctgacctgatgggcgagcaaaccatcctgtgcggtatgttgcaagctggttctctgctgtgcttcgacaagctggtggaagaaggcaccgatccggcatacgcagaaaaactgattcagttcggttgggaaaccatcaccgaagcgctgaaacagggcggcatcaccctgatgatggaccgtctttctaacccggcgaaactgcgtgcttacgcgctttctgagcaactgaaagagatcatggcgccgctgttccagaaacatatggacgacatcatctccggcgaattctcctccggcatgatggctgactgggccaacgacgataagaaactgctgacctggcgtgaagagactggcaaaaccgcattcgaaaccgcgccgcagtatgaaggcaaaatcggtgaacaggagtacttcgataaaggcgtactgatgatcgcgatggtaaaagcaggcgttgagttggcgtttgaaaccatggttgattccggcatcatcgaagaatctgcttactatgaatcactgcacgaactgccgctgattgccaacaccatcgcccgtaagcgtctgtacgaaatgaacgtggttatctccgatactgccgagtacggtaactatctgttctcttacgcttgtgtgccactgctgaaaccgtttatggcagagctgcaaccgggcgacctgggtaaagctattccggaaggtgcggtagataacgcgcagctgcgtgatgtaaatgaagcgattcgcagccatgcgattgagcaggtaggtaagaaactgcgcggctatatgacggatatgaaacgtattgctgttgcgggttaatagcgattcagagttcaaggccttctcccggagaaggcctttctgttagttacggtacagcactttaatgatgtggtaaccgaactgggtatgcagcgggccggttggctccagtaccggacaagagaaaaccactttatcgaacgccggaaccatttgaccctggcggaattcacccaaatcaccgccgcgtttgcctgacgggcaaatggagtgtttcttcgccagcttgccgaaatcggcaccattcttgatctgctcgagaagatccagagccagtttctcttcttttacaaggatatgcagtgctgctgctgtttttgccatgatcgtgccttgagtggtaaggatgaggctggctatactaccacgctgttattttcccctcccgactttcattgagcgattttcctatgcgtctaaaccccggccaacaacaagctgtcgaattcgttaccggcccctgcctggtgctggcgggcgcgggttccggtaaaactcgtgttatcaccaataaaatcgcccatctgatccgcggttgcggttatcaggcgcgacatatcgcggcggtgacctttaccaataaggcggcacgcgagatgaaagagcgtgtcgggcagacgctggggcgcaaagaggcgcgtgggctgatgatttccaccttccacacgctggggctggatatcatcaaacgcgagtatgcggcgctggggatgaaggctaacttttcgctgtttgacgataccgatcagcttgctttgcttaaagagttgaccgaggggctgattgaagatgacaaagttctcctgcaacagctaatttcgaccatctccaactggaagaacgatctcaaaacaccggcgcaggcggcggcagaggcaaagggcgagcgggaccgtatttttgcccattgttatgggctgtatgatgcacacctgaaagcctgtaacgttctcgacttcgatgatctgattttattgccgacgttgctgctgcaacgcaatgaagaagtccgcgagcgctggcagaacaaaattcgctacctgctggtggatgagtatcaggacaccaacaccagccagtatgaactggtgaaactgctggtgggcagccgcgcgcgctttaccgtagttggcgatgacgatcagtcgatctactcctggcgcggtgcacgtccgcaaaacctggtgctgttgagtcaggatttcccggcactgaaggtgattaagcttgagcagaactaccgctcttccggacgtattctgaaagcggcgaacatcctgatcgccaataacccgcacgtctttgaaaagcgtctgttctccgaactgggctatggcgcggagctaaaagttttaagcgcgaataacgaagaacatgaagccgagcgcgtcaccggcgagctgatcgcccatcacttcgtcaataaaacgcagtacaaagattacgccattctttatcgcggcaaccatcagtcgcgggtgtttgaaaaattcctgatgcaaaaccgcatcccgtacaaaatttctggtggtacgtcgtttttctctcgtcctgaaatcaaggatttgctggcttatctgcgcgtgctgactaacccggacgatgacagcgcatttctgcgtatcgttaacacgccgaagcgagagattggcccggctacgctgaaaaagctgggtgagtgggcgatgacgcgcaataaaagcatgtttaccgccagctttgatatgggcctgagtcagacgcttagcggacgtggttatgaagcattgacccgcttcactcactggttggcagaaatccagcgcctggcggagcgagagccgattgccgcggtgcgtgatctgatccacggcatggattatgaatcctggctgtacgaaacatcgcccagcccgaaagctgccgaaatgcgcatgaagaacgtcaaccaactgtttagctggatgacggagatgctggaaggcagcgaactggatgagccgatgacgctcacccaggtggtgacgcgctttactttgcgcgacatgatggagcgcggcgagagcgaggaagagctggatcaggtgcaactgatgactctgcacgcgtcgaaagggctggagtttccctatgtctacatggttggtatggaagaagggtttttgccccaccagagcagcatcgatgaagacaatattgatgaggagcggcggctggcctatgtcggcattacccgcgcccagaaggaattgacctttacgctgtgtaaagaacgccgtcagtacggcgaactggtgcgcccggagccgagccgcttcctgctggagctgccgcaggatgatttgatttgggaacaggagcgcaaagtggtcagcgccgaagaacggatgcagaaagggcaaagccatctggcgaatctgaaagcgatgatggcggcaaaacgagggaaataatcaaggccggaaaagatgtgtcagcatcgcatccggcacttactcattaatgcacttccagcggccagtggacatagctctgccactggctttcctgatcaataatctctttacccagcggatgttgggttagccaaccttgcggaagcgtcaaggtcaacagttcatggttagcctgtaatgtcatctctggcacgagatcgtcacggcgacggctggcaaaaatgatagccaggcggagtaaacggcagagttgttctgcgacgcgcggtggtacggcattttgctgatgcagcgatgagagatcgaccggattagtctggttgagcagtagcgtcgccagcagttttttctgtgcgggggtaaaaccgggaagatccagattacgtaccagataagcagcgtgttgcggcgcttgtttgaagtcaacgctcaggccgatttcatgaagctgacaggcgctgatgagcaaatcgcggcttattgcttcaagatgccattcattttccacctgatcgtagaagttagccgcaactttggctacgcgctgtgcctgatcaatatcgatcataaagcggcgctgaatattacgcagcgtacggctgcgaatatcctgctcgacggtaagatgcaacataccgtagaccaggccttcacgcagcgcaccgcccgccagggtcatacactgaatattcagttcggtaaaaatggctatcaggatcgccagaccactcgggaacactaacgcacgttccagcgtcagcccgtcaatctctagctcttccagccgaccgcaatgaatggcgcgttgtttcagttgctgcaacttttccagggtaatgcgttcatccatcccctgtgccatcatgatttcctgtaacgcctgcacggtgccggaagcgccaacgcacactttccagccgtgataccgtaattcatcggcaaccggacgtaacacttcgcgtgccgctttttctgcagcatcaaaattttcctgccccagattacgatcggcaaaatagcgttccagccaggtaacgcagcccatcgacaggctgaacaaagaggtggtttgtgcacccgtgccggttaccagttcagtactggctccgccgatatccaccaccaggcgctgatcggcaccgccagtggtgtgagcaacgccctgataaatcagacgcgcttcctcttcaccgctgatcacctgtaccggacaaccgaggatttcctgcgctttggcaataaaatcacccgcattgacggcaaggcgtaatgtcgccgtagcgacaacgcgaatttgcgagggagggatatcttgcagacgttcagcaaacaggcgcagacattgccaaccgcgctccattgcttcattagacagggcattttcgctattcaggccggcagccagacgcactttgcgttttattcgcgtcagcgtctggatgcttccagccacctcgcgcacaaccagcatatgaaaactattcgaaccgagatcaatggctgcatacagcgacgaggtggaacccatactcttcatccttcaatctgtctctgcgttggctgcattccttcacctgaatcacttacgacagtaagcgcatcgggattcattctcttgccatcttgatacagcttgaatgatttggagtatgacattttttctttaacctgaacgacgacgattacgcggagcgccagtacgacgcggaccattgcctgtgcgcgggcgcgtgaggcgcagcggttttggcagatcggtcatcaatgcgtccggattgtatttacttaccggaattgagtgaccaatataggtctcaatagcaggcaaattcaatgcatactcttcacacgccaggctaatagagtgaccgcttgcgcctgcgcgacctgttcgaccaatacggtgaacgtaatcttcacagtcatcgggtaaatcgtagttaaagacgtgtgtcacagcaggaatatgcaaaccacgcgcggcaacgtcggtggcaaccagaatatccagatccccacgggtaaattcatcaagaatacgcagacgttttttctgcgcgacatcgcctgtcaataaaccgacacgatgaccatctgccgccaggtggccccagatctcttcacaacggtgtttggtgttggcgaaaataatcgctctgtctggccactcttcttcgatcagcgtttgcagcaaacgcattttttcttcgttagaagggtagaaaagctcttctttaatacgatggcccgttttctgttccggttccacttcaatatattcggcattgttcatctgctcgaacgccagttcacgtacccggtacgaaagcgtggcggagaacagcatgttgaggcgctggtttgcaggcggcatacggcggaacagccagcggatatctttaataaagcccagatcgtacatgcgatcggcttcgtccagtaccaccacctgaatggcaccgaggttaatgtggttctgcttggcgtagtcaattaaacgacccgtggtgccaatcagaatgtcaacgccgctttccagcactttcagctgtttgtcgtagccatcaccaccgtaagccagacccagcttcaggccagtagcttccgccagcggttccgcgtcggcatggatctgcacggcaagttcacgcgtcggtgccataattaaggcacgcggttgattcaccttgcgatcggcaatcgcgggatgagagagaagataatgaaacgttgacgtaagaaacgccatcgttttcccggtaccggtttgcgcctgcccggctacgtcacgacccgccagcgtcagcggaagggccagtgcctgaatgggcgtacagttatgaaacccttttttttcaagggcttctacaaccttcggatgcagggcgaagtcggaaaacttctgttctgttaaatgtgttttgctcatagtgtggtagaatatcagcttactattgctttacgaaagcgtatccggtgaaataaagtcaacctttagttggttaatgttacaccaacaacgaaaccaacacgccaggcttattcctgtggagttatatatgagcgataaaattattcacctgactgacgacagttttgacacggatgtactcaaagcggacggggcgatcctcgtcgatttctgggcagagtggtgcggtccgtgcaaaatgatcgccccgattctggatgaaatcgctgacgaatatcagggcaaactgaccgttgcaaaactgaacatcgatcaaaaccctggcactgcgccgaaatatggcatccgtggtatcccgactctgctgctgttcaaaaacggtgaagtggcggcaaccaaagtgggcgcactgtctaaaggtcagttgaaagagttcctcgacgctaacctggcgtaagggaatttcatgttcgggtgccccgtcgctaaaaactggacgcccggcgtgagtcatgctaacttagtgttgacttcgtattaaacataccttattaagtttgaatcttgtaatttccaacgcttcccgttttatcttaaatgcgaagtgaacagatttctggctcgtcactcaatccgtcttgtcgtttcagttctgcgtactctcctgtgaccaggcagcgaaaagacatgagtcgatgaccgtaaacaggcatggatgatcctgccataccattcacaacattaagttcgagatttaccccaagtttaagaactcacaccactatgaatcttaccgaattaaagaatacgccggtttctgagctgatcactctcggcgaaaatatggggctggaaaacctggctcgtatgcgtaagcaggacattatttttgccatcctgaagcagcacgcaaagagtggcgaagatatctttggtgatggcgtactggagatattgcaggatggatttggtttcctccgttccgcagacagctcctacctcgccggtcctgatgacatctacgtttcccctagccaaatccgccgtttcaacctccgcactggtgataccatctctggtaagattcgcccgccgaaagaaggtgaacgctattttgcgctgctgaaagttaacgaagttaacttcgacaaacctgaaaacgcccgcaacaaaatcctctttgagaacttaaccccgctgcacgcaaactctcgtctgcgtatggaacgtggtaacggttctacggaagatttaaccgctcgcgtactggatctggcatcacctatcggtcgtggtcagcgtggtctgattgtggcaccgccgaaagccggtaaaaccatgctgctgcagaacattgctcagagcattgcttacaaccacccggattgtgtgctgatggttctgctgatcgacgaacgtccggaagaagtaaccgagatgcagcgtctggtaaaaggtgaagttgttgcttctacctttgacgaacccgcatctcgccacgttcaggttgcggaaatggtgatcgagaaggcgaaacgcctggttgagcacaagaaagacgttatcattctgctcgactccatcactcgtctggcgcgcgcttacaacaccgttgttccggcgtcaggtaaagtgttgaccggtggtgtggacgccaacgccctgcatcgtccgaaacgcttcttcggtgcggcgcgtaacgtggaagagggcggcagcctgaccattatcgcgacggcgcttatcgataccggttctaaaatggacgaagttatctacgaagagtttaaaggtacaggcaacatggaactgcacctctctcgtaagatcgctgaaaaacgcgtcttcccggctatcgactacaaccgttccggtacccgtaaagaagagctgctcacgactcaggaagaactgcagaaaatgtggatcctgcgcaaaatcattcacccgatgggcgaaatcgatgcaatggaattcctcattaataaactggcaatgaccaagaccaatgacgatttcttcgaaatgatgaaacgctcataaatttgtcttatgccaaaaacgccacgtgtttacgtggcgttttgcttttatatctgtaatcttaatgctgcgctggcgatgttaggaaaattcctggaatttgctggtgtgttatgcaatttgcatatcaagtagttaattttcgcatagtgctggtaggttcggaacggactttcctttctgaataaaggtcttcgtggttatacttctgctaataattttctctgagagcatgcattgtgaatttactgacagtgagtactgatctcatcagtatttttttattcacgacactgtttctgttttttgcccgtaaggtggcaaaaaaagtcggtttagtggataaaccaaacttccgcaaacgtcaccagggattgatacctctcgttggggggatttcggtttacgcagggatttgcttcacgttcggaattgtcgattactatattccgcatgcatctctctatctcgcttgtgctggtgtgcttgttttcattggcgcgctggatgaccgtttngatatcagcgtaaaaatccgtgccaccatacaggccgctgttggcattgttatgatggtgttcggcaaactttatctcagtagcctgggttatatctttggctcctgggagatggtgctcggaccgtttggttacttcctgacgctatttgccgtctgggcggccattaatgcgttcaacatggttgatggcattgatggcttgctgggcgggttgtcctgcgtctcgtttgcagcaatcggtatgattttgtggttcgacgggcaaaccagtctcgcaatctggtgctttgcgatgatcgccgccatcctgccatacatcatgcttaaccttggtatcctgggtcgccgctacaaagtctttatgggggatgcgggcagtacgctgattggttttaccgttatctggatcctgctcgaaacgacccagggcaaaactcatcccatcagcccggttaccgctttgtggataatcgccattccgctaatggatatggtggcgattatgtaccgtcgcctgcgtaaaggcatgagcccattctctccagaccgtcagcatattcaccatttgatcatgcgtgccgggtttacttcccgccaggcgtttgtgctgattacccttgccgcagcactgctcgcttccattggcgtgctggcagaatattctcattttgtcccggagtgggtcatgctggtgctctttttgctagcattcttcctctatggatattgcatcaagcgtgcctggaaagttgctcgctttattaagcgcgtaaaacgcagactgcgtagaaatcgtggtggcagccccaatttaaccaaataaatgaggatgtgatgacacaaccaatgcctgggaaaccggccgaagacgctgaaaatgaactggatattcgtgggttgtttcgtaccttgtgggctgggaagctgtggattattggcatggggctggcgtttgcgttaatcgcgctggcgtatactttttttgctcgccaggagtggagctcgacagcgattaccgatcgtccaacggtgaatatgctggggggatattactcacagcagcaatttttgcgtaacctggatgtccgttcaaacatggcttctgccgaccaaccatcggtcatggacgaagcctataaagagtttgttatgcaactggcctcgtgggatacccgcagagagttctggctgcaaaccgactattacaaacagcggatggtgggcaatagcaaagccgatgcggcgttgctggatgaaatgatcaacaacatcgtgtttattcccggtgacttcacccgcgcggtcaatgacagcgtgaagctgattgccgaaactgcgcctgacgctaataacctgttacgtcagtatgttgcttttgccagccagcgtgcagccagccatctgaatgatgagctgaaaggcgcatgggcggcacgcaccatccagatgaaagctcaggtgaagcgtcaggaagaggtggcgaaagctatctacgatcgccggatgaacagtattgaacaggcgctgaaaattgctgagcagcataatatttcgcgcagtgcgacagatgtgcctgccgaggaattacctgattcagaaatgttcctgcttgggcgtccaatgctccaggctcgactggaaaatttacaggccgtcggtccggcctttgatctcgactatgatcaaaatcgggccatgttaaacaccctgaatgttggtccaaccctggatccgcgttttcagacctatcgctatttgcgtacgccggaagaaccggtaaaacgcgatagcccacgtcgtgccttcctgatgattatgtggggcattgtcggggggctgatcggggctggtgtcgcattaacccgccgttgctcgaaatagcaacactgctgcggtgagcgcaaaggcgctcgccgcttattcgaagagaatcgatgtgaaagtactgactgtatttggtacgcgcccggaagccatcaagatggcaccgttggtgcatgcgttggcaaaagatcctttttttgaggctaaagtttgcgtcactgcgcagcatcgggagatgctcgatcaggtgctgaaactcttttccattgtacctgactacgatctcaacataatgcagccaggacagggccttacagagataacctgtcggattctggaagggctaaaaccaattcttgccgagttcaaaccagacgtcgtgctggttcacggtgatactactacaacgctggcaaccagcctggcggcgttttatcagcgtattcctgttggtcacgttgaggctggtctgcgcacgggcgatctctattcgccgtggccggaagaggctaaccgtacattgaccgggcatctggcgatgtatcacttctctccaaccgaaacttcccggcaaaacttgctgcgtgaaaacgttgctgacagccgaatcttcattaccggtaataccgttattgatgcactgttatgggtgcgtgaccaggtgatgagcagcgatacgctgcgttcagaactggcggcaaattatccgtttatcgaccctgataaaaaaatgattctggtgaccggtcacaggcgtgagagctttggtcgtggttttgaagaaatctgccatgcactggcagacatcgccaccacgcaccaggacatccagattgtctatccggtgcatctcaacccgaacgtcagagagccggtcaatcgcattctggggcacgtgaaaaatgtcattctgatcgatccccaggagtatttaccgtttgtctggctgatgaaccacgcctggctgattttgaccgactcaggcggcattcaggaagaagcgccttcgctggggaaaccggtgctggtaatgcgcgataccactgagcgtccggaagcggtgacggcgggtacggtgcgtctggtaggcacggataagcagcgaattgtcgaggaagtgacgcgtcttttaaaagacgaaaacgaatatcaagctatgagccgcgcccataacccgtatggtgatggtcaggcatgctctcgcattctggaagcgttaaaaaataatcggatatcactatgagttttgcgaccatttctgttatcggactgggttacatcgggctgcctacagcagctgcgtttgcctcaaggcaaaaacaggtgattggtgtcgatatcaaccaacacgcggttgataccatcaatcgtggcgaaatccatatcgtcgagcctgatttggcgagcgtagtaaaaactgccgtagaaggcggttttttacgagcgagcacgacgccggttgaagcggatgcctggctgattgctgtacccacgccgtttaaaggcgatcatgagccagatatgacctacgttgaatcggctgctcgctccattgcgccagtgctgaaaaaaggcgcgttggtgatccttgaatccacctcgccggtggggtcaaccgagaagatggcagaatggttagcagagatgcgtccagatctcactttcccacagcaggtgggcgagttggcggacgtcaacattgcttactgcccggaacgcgtattaccgggccaggttatggtcgagctgattaaaaacgatcgcgtgattggtggtatgacgccggtttgttcggcccgcgccagcgaactgtacaaaattttcctcgaaggtgagtgtgtcgtaactaactcgcggacggcggaaatgtgtaagctcaccgaaaacagctttcgcgatgtgaatatcgcttttgctaatgaattgtcgctgatttgtgccgatcaggggattaacgtctgggaactgattcgcctggcgaatcgtcaccctcgcgtcaatattcttcagccaggccctggcgtgggcggtcactgcatcgctgttgatccgtggtttatcgtggcacagaacccccagcaggcgcggcttatccgtaccgcgcgcgaagtgaacgatcacaaaccgttctgggttatcgatcaggtgaaagcggcggtggctgattgtctggctgctaccgataaacgcgccagtgaactgaaaatcgcctgctttggtctggcgtttaaaccgaatattgatgacctgcgtgaaagccctgcgatggaaatcgctgaactgatcgcccagtggcacagcggcgaaacgctggttgttgagcctaacatccacgagttgccgaagaaactgaccgggctttgtactctggcgcagcttgacgaggcgctggcaacggcagatgtgctggtgatgctggtcgatcatagtcagttcaaagttatcaatggcgacaacgtccatcagcagtatgtcgtcgatgccaaaggagtctggcgctgatgagaaagattctgataacaggtggtgccgggtttattggctcggcgctggtgcgttatatcatcaacgaaacgagcgacgcggtggtggtggtcgataagctgacctacgccggaaacctgatgtcgctggcaccggtcgcgcaaagcgagcgctttgcctttgagaaagttgatatctgcgatcgggcagaactggcgcgcgtattcactgagtatcagccagactgtgtcatgcatctggcagccgaaagccatgttgaccgttctattgacggcccggcagcgtttattgaaaccaacattgtcgggacttatacactgcttgaagcggcgcgggcttactggactgcgctgacggaagataaaaaatcagcgttccgttttcatcatatctccaccgacgaagtatatggtgacctgcactcgacggatgatttcttcaccgaaaccacgccgtatgcgccgagcagcccttattccgcgtcaaaagccagcagcgaccatctggtgcgcgcctggctgcggacctatggtttgccgacgcttatcaccaactgctcgaataactacggtccttaccactttccggaaaaactgatcccgctgatgatcctcaacgcgctggcgggtaaaccgctgccggtatatggcaacgggcagcaaatccgtgactggctgtatgttgaagatcatgcccgcgcgctgtattgcgtggcgaccaccgggaaagtcggtgaaacctataatattggcggtcacaacgagcgtaagaatctcgaggttgtggaaaccatctgcgagctgctggaagaactggctccgaacaagccgcacggcgtggcgcactatcgcgatctgatcacctttgtcgctgaccgtccagggcatgacctacgctatgccattgatgcttcgaaaattgcccgtgaacttggctggctgccgcaggaaacctttgaaagtggaatgcgtaaaacggttcagtggtatctggctaatgaaagctggtggaagcaggtgcaggacggcagctatcagggcgagcgtttaggtctgaacggctaattctcagcggaggcaaacatgaaaggtattatcctggcgggcggttccggcacccgattgcatccgattacgcgcggcgtatcgaagcaactgttgccgatttacgataagccaatgatttactatccgctgtcggtgctgatgctggccggtatccgcgaaattctcatcatcactacgccggaagacaaaggttatttccagcgcctgctgggcgatggtagtgagttcggtatccagctggaatatgccgaacagcccagcccggacggtcttgcgcaggcatttatcatcggtgaaaccttccttaatggtgagccatcttgtctggtgctgggcgataacatcttcttcggtcagggcttcagtccgaagctgcgtcatgttgcggcgcgcacgcaaggggcgacggtatttggctatcaggtaatggatccagaacgctttggcgtcgtggagtttgacgacaatttccgcgctatctctctggaagaaaagccaaaacagtcaaaatcaaactgggcggtgaccgggctttatttctacgacagtaaagttgtggagtacgcaaagcaggtgaagccgtcggagcgtggtgaactggagattacctccatcaaccagatgtacctcgaggcgggcaacctgaccgttgaactgctcgggcgcggatttgcctggctggacactggcactcacgacagcctgattgaagccagcacctttgtacagacggtggaaaaacgccagggctttaagattgcctgcctggaagagatcgcctggcgtaacggctggcttgatgacgaaggcgtgaagcgcgccgccagctcgctggcgaaaactggctacggccaatatctgctggagttacttcgtgcccgtccgcgccagtattgagccactaacctgggaaaacgccttctttggtgttaacagtgccattgtgcgcattacgtctgaagcaccgctcctgacgccagacgcgttagcgccgtggtcacgggtgcaggccaaaattgcggcatcaaatacgggtgaactggatgccctgcaacagctgggattctccctggtagaaggtgaagttgatttggcgctacccgtgaacaatgtcagtgatagcggtgctgtagtggcacaagagaccgatattcccgcattacgtcagttagccagcgccgcatttgcgcaaagccgttttcgtgcgccatggtatgcgcctgacgccagcggtcgcttttatgcgcagtggattgaaaatgccgtgcgcggcacctttgatcatcaatgtctgattttacgtgcggcgtccggcgatattcgcggctatgtctctttacgggaactcaatgcgacagatgcgcgaattggcctgctggctggacgcggtgcaggtgctgagctgatgcaaacagcgctaaactgggcgtatgctcgcggtaaaacaactttgcgggtggcgacccagatgggcaacaccgccgcgcttaaacgatacatacaaagtggtgcgaatgtagaaagcaccgcgtactggttatacaggtgatcacatgattccatttaacgcaccgccggtggtgggaaccgaactcgactatatgcagtcggcaatgggtagcggcaaactgtgcggcgatggtggttttacccgtcgctgccagcagtggctggagcaacgttttggcagcgccaaagtgttactgacgccatcctgtaccgcttcgctggagatggcggcgctgctgctcgatatccagcctggcgatgaagtgatcatgccgagctacacctttgtctccaccgccaatgcctttgtgctgcgtggcgcgaaaatcgtctttgtggatgttcgcccggacaccatgaacatcgacgaaacgctgattgaagcggcgatcaccgacaaaacgcgcgttatcgtgccggtccattacgcgggtgtggcctgcgaaatggacaccattatggcgttggcgaagaagcataatctgtttgtggtggaagatgccgctcagggcgtgatgtccacttacaaagggcgtgcgctgggaaccattggtcatattggctgctttagcttccatgaaaccaaaaactacacggcgggtggtgaaggcggcgcgacgctgattaacgataaagcgttgatcgaacgagccgagatcatccgtgaaaaaggcacaaaccgcagccagttcttccgtggtcaggtcgataaatatacctggcgcgatattggctccagctatttgatgtccgatctgcaagctgcgtacctgtgggcgcaactggaagctgcggatcgtatcaaccagcaacgtctggcgctgtggcaaaactactacgatgcgctggcgcctctggcaaaaaatgggcgtatcgagctgccgtcgattcccgatggctgcgtgcagaacgcgcatatgttctacattaaactgcgggatattgctgaccggagcgcattgattaactttctgaaagaagcggaaatcatggcggtgttccattacattccgctgcacggttgccctgcgggggaacgctttggtgagttccacggcgaagatcgctacaccaccaaagagagcgagcgcctgctgcgcctgccgttgttctacaacctgtcgcccgtcaatcagcgtacggtaattgcgaccttgttgaactacttctcctgatatgtcgttggcaaaagcgtccttgtggacggcggccagtacactggtcaagattggtgccgggttactggtcggtaagttgctggcagtgtcatttggtccggcggggcttgggctggcggcaaatttccgccagttgattaccgtgctcggcgtgcttgccggggcaggcatctttaacggcgtaaccaaatacgttgcccagtatcatgataatccccaacagctgcgccgcgtagtcggcacttcatcagcgatggtacttggcttctctacgctaatggcgctggtttttgtgctggcagctgcgccaatcagccaggggttgtttggtaataccgactatcaggggctggtgcgtttagtggcgctggtgcaaatggggattgcctggggcaacctgttactggcgttgatgaaaggctttcgcgatgccgcaggtaatgcgttatctctgattgtcggtagcttgattggcgttctcgcgtactacgtcagttatcgtttgggcggttatgaaggggcgttgctgggtctggcgctgattcccgcgctggtggtaattcctgctgttatcatgttgatcaaacgtggtgtcatcccgttaagctatctgaaacccagctgggataacggtctggcagggcagttgagcaaatttacgctcatggcgttgattacgtcggtgaccttgcctgttgcttacatcatgatgcgtaaactgctggcggcgcagtatagctgggatgaagtggggatctggcaaggggtgagcagtatttccgatgcctacctgcaatttattacggcatcgttcagcgtatatttgctgcccacgttgtcgcggttaacggaaaagcgcgatatcacccgggaagtggttaaatcgctgaaatttgtcttaccggcagtggcggcggcgagttttaccgtctggttgctgcgtgattttgctatctggctgctgttgtcgaataaatttaccgctatgcgcgatctctttgcctggcagttggtgggtgatgtgttaaaagtgggcgcttatgtctttggttatctggtgatcgccaaagcgtcactgcggttttatattctggcggaaatcagccagttcactttattgatggtatttgccaactggctaatccctgcgcatggcgcactgggcgcagcacaggcctatatggcaacctatatcgtctatttttctctttgttgtggcgtgtttttactctggcgtaggcgggcatgactgtactgattcacgtactgggatcggatatccctcaccataaccgaaccgttctgcggtttttcaacgacgcgctggccgcgacgagcgagcacgcgcgcgagtttatggttgctggcaaggacgacggcttaagtgatagctgtctggcgctttctgtgcaatttttccctgggaaaaaatcgctggcggaagcggtcatcgcgaaagcaaaagctaaccgtcagcagcgattttttttccacggtcagttcaatcccaaactgtggctggctctgctgagtggtggcattaagcccagccagtttttctggcatatctggggagcagacctgtatgagctttccagtggcttgagatataagcttttttacccgctacgtcgcctggcgcaaaagagagtcggctgtgtatttgccacccgcggtgatttgagcttttttgccaaaacgcatccaaaggtgcggggagaactgctgtacttcccgacgcggatggacccttctcttaatacgatggcgaacgatcggcaacgtgaaggaaaaatgaccattctggtggggaactccggtgaccgcagcaatgagcatattgctgccttgcgcgccgttcatcagcaatttggcgatacggtaaaagtggtggtgccgatgggatatccgcctaataacgaagcgtacatcgaggaagttcgtcaggcgggactggagttattcagcgaagaaaacctacaagttctgagcgaaaaactggaatttgacgcctatctgacgctacttcgccagtgcgatctcggttactttatttttgcccgccagcagggcattggtacgctttgcttactgattcaggcgggcattccttgtgtgcttaaccgggaaaatccgttctggcaggatatgacggaacagcatttgccagtactgtttactaccgatgatctcaacgaggatattgtgcgtgaagcgcagcgccagttggcgtcggtggataaaaacaccattgccttctttagccctaactatctacaaggctggcagcgggcgttggcgattgccgccggggaggtcgcatgagtctgctgcaattcagtggcctgtttgttgtctggctgctctgcacgctgtttattgccacgctgacctggtttgagtttcgccgtgtgcgctttaacttcaatgtcttcttttcattgctgtttttgctcacctttttcttcggctttccgctgaccagcgtgctggtatttcgctttgatgttggtgtcgcgccgccagaaatcttgttgcaggcgttgctttctgcaggctgcttctacgcggtttactatgtcacctacaaaacccgtctacgcaaacgcgttgctgatgcaccgcgccgtccgctgtttaccatgaaccgcgtggagaccaatctcacgtgggtgatcctgatgggcatcgctctggtgagcgtcggcatcttcttcatgcacaacggctttttgctgttccggcttaattcttacagtcagatcttttccagcgaagtctccggcgtggcattaaaacgcttcttttactttttcatcccggcgatgctggtggtttattttctgcgccaggatagcaaagcgtggctgtttttcctcgtcagcacggttgcctttggcttgttgacttacatgattgtcggcggcactcgcgccaatatcatcatcgcattcgctatcttcctgtttattggcattattcgcggctggatttctttgtggatgctggcggcggcgggcgtgctggggattgtgggcatgttctggctggcgctaaaacgctatggaatgaatgtgagcggcgatgaagcgttctatacgtttctctatctcactcgcgacaccttctcgccgtgggagaatctggcgttgctgttgcagaactacgacaacatcgacttccagggcctggctccaattgtccgcgatttctatgtctttatcccttcctggctgtggccgggtcgcccgagtatggtgctgaactccgccaactactttacctgggaagtactgaataaccactccggactggcgatctcgcctacgcttataggctcactggttgttatgggcggcgcgttgttcatcccgctcggggcgattgttgttggactgatcatcaaatggttcgactggctgtatgagctgggcaaccgcgagactaatcgctataaggctgcgatattgcacagtttctgcttcggggcgatcttcaatatgatcgtgctggcgcgtgaagggctggattcgtttgtctcacgcgtggtcttttttatcgtggtcttcggcgcatgtctgatgatcgcaaaactgttgtactggctttttgaaagcgccggactcattcataaacgaacaaaatcatcgctccggacgcaggttgaaggataacaatgaataacaacaccacggcaccgacctatacgctgcgtggcttacagttgattggttggcgtgatatgcagcatgccctcgattatctgttcgctgacgggcagcttaagcagggaacgctggttgccattaatgccgaaaaaatgctgaccattgaagataacgccgaggtcagggagttaattaacgctgccgaatttaaatatgcggatggcatcagcgttgtacgttcagtacgtaaaaagtacccgcaggcgcaggtttcccgcgttgctggggccgatctctgggaagagctgatggcgcgcgcaggcaaagaagggacaccggtatttcttgtgggcggtaaacctgaagtgctggcgcaaactgaagctaaactgcgcaaccagtggaatgtgaatatcgttggcagtcaggatggttattttaaacccgagcagcgtcaggcgctgtttgaacgcattcatgccagcggagcgcaaatcgtcaccgttgcgatgggatcgccaaagcaggagatcttcatgcgcgactgccgtctggtgcatccagatgcgctgtatatgggcgttggcgggacctacgatgttttcaccggtcacgtaaaacgcgcaccgaaaatctggcaaacgctggggctggagtggctctaccgcctgctttcgcagccgagccgcattaagcgtcagcttcgtttgctgcgttatttacgctggcattacaccggcaacctctgattttcctctctttgtaaagcgacgaagtggtcacttcgtcgcctgtctgcttttttattacacaaagcattcaaatttttaatgctttatttgccatttctcctgaattacgaaaacattcgcaacactcgatgtacccataacgataaccggtaacaccggaaagcatgcaaacacaacacgaggatttatggcagataacaaaccagagctacagcgtgggctggaagctcgacatatcgaactcatcgccctggggggcaccattggcgtcggcctgtttatgggggccgccagtaccctgaaatgggccgggccatccgtattgttggcctatatcatcgccgggctgttcgtctttttcatcatgcgttcaatgggcgaaatgttgttcctcgaaccggttaccggttcgttcgccgtttacgcgcatcgttatatgagcccattctttggttatctcaccgcctggtcttactggtttatgtggatggcggtggggatctcagaaatcaccgccattggcgtttatgtccagttctggttcccggagatggcgcagtggatacccgcattgatcgcggtggcgctggtggcgttggcgaatctggctgcggtgaggttgtacggcgaaatcgagttctggttcgcgatgatcaaagtcaccacgattatcgtgatgattgtcattggcctgggcgtgattttctttggctttggcaatggcgggcagtcgattggttttagcaatctcacagagcatggcggtttctttgctggtggctggaaagggttcctgaccgcattgtgtattgtggtggcgtcctaccagggcgtggagctgattggcattactgccggtgaagcgaagaatccgcaggtgacgctgcgcagtgccgtaggcaaggtgctgtggcgaatcctgattttctacgttggcgcgattttcgttatcgttactatcttcccgtggaatgaaataggcagcaacggtagcccgttcgtactgactttcgccaaaatcggcattaccgcagcggcgggcattatcaactttgtggtgctgacggctgcgctctctggctgtaacagcggcatgtacagttgcggacgtatgctctatgcactggcgaaaaaccgtcagttaccggcggcaatggcgaaagtttcccgtcacggcgtaccggttgcgggtgtggcagtatctattgctattctgctaattggctcatgcctgaactacatcattcccaatccgcagcgtgtgtttgtttacgtctacagtgccagcgtgcttccggggatggtgccatggtttgtgatattgataagccagctgcgttttcgtcgtgcgcataaagcagcaattgccagccatccgttccgctcaatcctgttcccttgggccaactacgtaacaatggcattcctgatttgcgttttgatcggcatgtactttaatgaagatacgcgtatgtcgctgtttgtcggcatcatctttatgctggtggtgacggcgatttataaagtttttgggcttaatcgccacggtaaagcgcataaactggaggaataagcagcaaaacgcacaaaccgtaaccaaacgcgcaatttatttaaaaagggactagacagaggggtgggaagtccgtattatccacccccgcaacggcgctaagcgcccgtagctcagctggatagagcgctgccctccggaggcagaggtctcaggttcgaatcctgtcgggcgcgccatttagtcccggcgcttgagctgcggtggtagtaataccgcgtaacaagatttgtagtggtggctatagctcagttggtagagccctggattgtgattccagttgtcgtgggttcgaatcccattagccaccccattattagaagtggtgacaatgcgaaggtggcggaattggtagacgcgctagcttcaggtgttagtgtccttacggacgtgggggttcaagtcccccccctcgcaccacgactttaaagaattgaactaaaaattcaaaaagcagtatttcggcgagtagcgcagcttggtagcgcaactggtttgggaccagtgggtcggaggttcgaatcctctctcgccgaccaattttgaaccccgcttcggcggggttttttgttttctgtgcatttcgtcactttcccttcgcaataaacgcccgtaataacgcattgcgccacggtatgatttcgcccttaacttattgaaggatgacttcaggcaaggagcgaccatgcagcaacaggttccaacgcgtgcttttcatgtgatggcgaaaccgagcggttctgattgtaatctgaactgtgactactgtttttatctcgaaaaacaatccctttaccgcgaaaagccagtcacgcatatggacgatgacacgctggaagcgtatgtccgtcactatatcgctgccagcgaaacccaaaacgaagtggcttttacctggcagggcggcgaaccaacgttactcgggctggatttttaccgccgtgccgtggcgctacaggcgaaatatggtgctggcaggaagataagtaatagcttccagactaacggcgtgctgctcgatgacgaatggtgtgcatttctggcagaaaatcattttcttgtagggttatcgctggatggtccggctgagatccacaatcaatatcgcgtgaccaaaggtggcagaccaacgcataagctggtgatgcgtgctctgacgctcctgcaaaaacatcatgtcgactataacgtgctggtctgcgtcaatcgcaccagtgcgttacaacctttgcaagtctatgattttctgtgtgatgcaggtgttgagttcatccagtttattccggtggtcgagcgcctggctgatgaaacggctgctcatgctggacttaagctacatgctcccggcgatattcagggcgaactgacggaatggtcggtgtgcccgcaagagttcggtgagtttctggtggcgattttcgaccactggattaagcgcgacgtcggcaagattttcgtaatgaatatcgaatgggcgttcgccaattttgtcggcgcaccgggcgcggtttgccatcatcagccaacctgtgggcgctcggtgattgttgaacacaacggcgatgtttacgcctgcgatcactatgtttatccgcagtatcgactagggaatatgcttcagcagacgattgcagaaatgattgattccccgcaacagcaggcatttggtgaagataaattcaagcagttaccggcacagtgtcgcagttgcaacgtgttaaaagcgtgctggggaggctgcccgaaacaccgctttatgctcgatgccagcggcaaacccgggctgaattatttgtgtgccgggtatcagcgttatttccgccatctaccgccatatcttaaagcaatggctgatttgctggcgcacggtcgtccggccagcgacattatgcaggcgcatttgatggtggtgaataagtagaaatcggcggccgcctgcggttgattgccggatgcggcgtgaacgccttatccggcctacaatcattgcaaattcaataaattgcagcgttctgtaggctggataagatgcgtcagcatcgcatccggcaaaggcagatctcagcgatagcgccggcttaatcagatttaatctgcgcgcgtggtggatattttttcaggatctccatatacgcatgcatttcggtctgtagcggtacacccattgggatatggcgcacgccgatagagtcgctttcctgcggatcggtgtacaggttaaacaccgacgatcccgccgtttgcattactgtgccggtgaatccaccctgatatccgctctgggtataagcgtaaggttgctgaatcaggacgtgatacttgaactcatccatacgcacagcagaaagtttaccgttgaggaagtagtgctcggccttacggttagactgaccatttgttcccaggaagaaagatgtctggtccacaccatcgataaaggtggttttcggtactaaattcgctactttcgccccaggatgccccgccagatccagcgccgtagggaagagatccgccagatcgacaatgccgtcagatttacgcggttggatcatgcctttccagtaaacgaaggttggcacacgaacgccgccttcccatgtagaacctttcgcaccgcggaacggcgtgcgaccgtgcggcggaacttcggcttccggaccgttatcagaggtgaacacaatcagcgtgttatcaagctgaccgtttttctccagtgctttatacagattggcgaagatatcgttcatctccaccatgcagtcgccgtaagaggtgcgcgccggagagctacccgcatatttggcgttcgggtagttatcgaagtgacagccgcgagtgccgtaatagaggaagaaaggcttatcactcttcgccatcttgtcgaggaacttaacgccatattccatccagcgttgatccaggtcttccatatatttcggcgtaatgtcggcaatggcttcctgttcaccgccgcgcacggcatgaacgtcatctttgctgaacggcagtttttggatgtattcagaacgagccgggctcagggcgacttccgggttgacatgaacatcacgccattcggtatacatatcggacaccgagttaaagccgcggaaatcatcaaagccaacgttctgcggctgcgactctttgttttcccccatatgccatttcccgatagcctgggtgacgtagccctgatcgtgcagcaactgcggcagcgtggttaacccttgcagaccgcccggttgcccgtacattggcggcatcagaatgccgtggtggatggagtattgtccggtgagaatcgtggcgcgggttggggaagaactcggttgagaatacgccgaagttaaaatcagcccctggctggcaacggcgtcgatatctggtgtagggttacccaccgccacgccgccgccgttaaagccaacgtccatccagcccacatcatccagcaagaaaacaaccacgttcggtttcttaccggtttttttctcaagttccgccagtttctgctgggtttctttgtcttgtgcaggatgctgcatcaccggcatcatgttgtcggcaatagtggtcgccggtttaaccagatactggtttgggtgatcgtatccggcaaagcctttgcgtgcggtggcggttgacggggtatctgctgcgctggctatgagaggaagagctgcggcgacagcaacaacaagaagtttgggtgaaaacgaaaattccatgcaaaatgctccggtttcatgtcgtcaaaatgatgacgtaattaagcattgataattgagatccctctccctgacaggatgattgcataaataatagtgataaaaataaattatttatttatccagaaaatgaattgaaaaatcaggagagcattttcaatcctacctctggcgcaggtgatatgtaaggcggtgatgttatatcgcgttgattattgatgctgtttttagttttaacggcaattaatatatatgttattaattgaatgacttttattattcattatatatatgtgtagaattgtgcgcaggagaaatattcactcaggaagttattactcaggaagcaaagaggattacagaattatctcataacaagtgttaagggatgttatttcccggttctctgtggcataataaacgagtagatgctcattccatctcttatgttcgccttagtgcctcataaactccggaatgacgcagagccgtttacggtgcttatcgtccactgacagatgtcgcttatgcctcatcagacaccatggacacaacgttgagtgaagcacccacttgttgtcatacagacctgttttaacgcctgctccgtaataagagcaggcgtttttttatatatcagaaaggccccggaggtgcttgcctccgggtgagaaagagctactgtggcgggttgttctgcaacgttaacatcaaaccgtcgcgacgcatcgctgcggcttcttccggcttgtgcagtctgtccagcgcgtcggcaagccatgcgtaatcgtaggcgtccggacgttgtttcagcgctgcgcggaaggcgagcgatgcttcctgccattctccgtgtttcatcagcgactgacccagtgtgctccacaacagcgggcgatcgcccacgtttttgatctgttggcgcagcactttttccagctgttccgggttattggttttcagacgcgggatcggcagcagcaggcgatcgtcatactggcgtttcaggccatcgatgataatttgctgggcagtatcatgatcgtcacactcaataagatgttccgccattgccacctgcaaggccacctgatgacgcgttttccggctttggtttttccaccagttacgcaaaccttcactaccgttatcggcacgcgcctgatccatcaggccaatccatgcctgttgttccagcattgcacgatgttcttcatcaccaacatgggctttcgccattgatgggatgatatccagcagcgaactccatgcaccagtgcggatatacgcctgttccgccagacgtaatacttccggatggcgtggcgtaacttccagcagcttatccacgccgtgacgtgctgcatggttttcattacgggccagttgcagacgtacacgggtgatttctaccggaatggtgtcattgccggccagctccgctgcgcgttccagatgttggttggcgcgtgcttcatcaccacgttgttgcgcggcttcggctgccagtagatagttcaccaccggttgttcagcgtgatcggcatttttcgccatcagcttttcaacttgctgataatcgccttccgccagtttcagcagcgcctgttcggtctgcttacgtgcacggcgacgcttacgtccgacaaaccacccacgggtgtgcgcgcctgtgcggaagattcgccgcagtagccactcaatggcaaacagcactaccatcgccagaatcaaaataatcgcgaggcccgtgacgctggtttcaatattgtagttgtcggtctggatcagcacgtaaccctgatggccggcaatcatcgggccaaccacgatccccgcaatcagcaacacaaagagcaataacacttttagcatggttattctccttgcggcgcggctgccggagcatcagcttgcggtgcaggtgcaggtgcaggtgcaggtgcaggtgcaggtgcaggtgcaggtttagcttccgttgtccctgctgccggttgtgccagcaggttacgcacgcgggtctgcatcaatttttccagcatcgcctggctttgcagggtttccggaagatccatcgagatattttgctggcttaactggtccacctcgtcgaggaacgctttggtggtggcatcatcagtatcgtagtaagcacgtacccaggtggagacgttctccagcgcctggcgataagtctcttcctggtgacgcggtacagcttgtgctgcgaccagcaggcgagagcgaatattttcgcgcagatagatatcctgatttggcgctaacagcggtacggcggtgtcatcacgacggcgaatcgtaatgaagttgtccataaagttctgccagcttttttgcagattgatacgccattcgctgatggaactggaaagctcttcaccgtcggaatccatcggcgaaccatcgctgtcattatcggccagacgcagattatctacctgatttgaaagctgattaagcttaaggatgataccgtcataatccacctgcgataccgcagaaaggctggcgatatcatcggtaattgcccggcgaacggtaatcagactcgggtcattcatatccgccaggctggcgtctgcacttttcagcaacgctgcagcggtcgtgacgtcctgatcgctccacagcttccgtccggcgagtttcaccagaaaatcggcctgggccagcagccaggttttagcatcgctgccggaaatggtggcgaccttttgttggacttcatccagctgttttgccagcgtttcttgctgacgattcgcctgctcaagctgtacagcttgttgcttgataatgccttccagctcggctttttggctctcctgggctttttgcagtgccgtaagttggttagccagggcatcgctggtggcagtctgattgacggcctgttgtttaccccagccatacaaaccgacgcccgccgccagagcaatagcgatagccaccgcgctgagaatcaatgcggtattgttcttactctttttttctgttgcgacaggttgtgacgtggtgtccacggcctccctggtctcttcaaccacggcggaggttttttcttgttccgtcattatggcttcctgttatgagagttattgtaatgcccgtaaaagcgcatcgttgtcagcgttatcggcgaccttaatgtcttgccagcccagttcccgggcgagtttcgccaaacgctcactgacgaccaatagtcgacagcgtagtaaccagtgctcacgataccattgtgggatcagcgaccagagttgctgcaacatttcaccgctggtaacaacgaccgtcgtcacctcgcgggattgccagcgcatcgcttcttctgcaccatcgtaatggattgcgcatcgttgataacattcacaaaaagtgacctcagcaccgcgcgccgtcagggaatccccaattagctcacgaccgccattgccacgtaatatcagcgcacgtttgcccgcaatattttgtaattcaggtaattgtagcaagacttcgctgatttcccgatcctgcgggtagagaatcttctgtccgcttacggtatgtagtgccagcgcggtggtgcgtccaatggcgaaataatcaggtagtcggggccatttacgatcttgctgatgcagctgtgattgggcaaaagcaaccgcgtgttgcgagagggcaaacaacagatcgctctctcccagcgctgccagttgatcagcaagttgcggtaattgtcgacccggagaaaactcaatcagcggaaaatgccatgccacctgccccagtgtgcgcagacggctcactaactcttctcctgcgggaaacgggcgggtgaccaggatactcatgccggggcgtctccgttatagacttcagcgaggatctcgcgcgcgccgttattcagtagctcttctgccagcgaaatccccatttgttcggcatcttgcggcgcaccgcggcgttcaccgcgaataatctgcgaaccgtccggcgcgccaaccaacgcacgcagccagatttcgccatcaataagctcggcgtagctaccaattggcacctgacatccgccttcgagacgggtattcatggcgcgttcggcggtaacgcgcagtgcagtttcgtggtgattcagcgcggcgagcagctcgcgagtgcgtgcatcatcaaggcggcattcaatgcccaccgcaccttgccctaccgccggaagagaaatctcgggtggcaacgcggcgcgaatgcgggactccagacctaaacgttttagtccggctacggcaagaatgatggcatcatattcgccgttatccagtttgctcagacgagtgccgacgttgccgcgcagggagcggataatcagatccgggcggcgttcagccagttggcactggcgacgtaaactggacgtcccgacgatactgcctgccggtaacgcatccagactgtcataggtgttggatacaaaggcatcgcggggatcttcgcgctcgcaaatggtgaccagccccagaccttgcgggaattcaacgggcacatctttcattgaatgaacggcaatatcggcgcgattttccaggagcgcgacttccagctctttcacaaataagcctttcccgcctactttcgccagcggcgtatcaagaatcacatcgccgcgcgtcaccatcggtaccagttcaacgaccaggcccggatggctcgccatcaacttgtctttgacatagtgtgcctgccagagtgcaagtgggctttggcgtgtggcaattcttaaaacattgtctaacatgcttgttaccgtcattatcatccgtggtccatcctaacatccttgccagagcgatgtcagtgttgtggtgaaacgtagacgcctgcgcaaaccgtaaaatgaggtctggcagtggatcctgacaggcgctttgagccttcgtaataaggaatttacagagaataaacggtgctacacttgtatgtagcgcatctttctttacggtcaatcagcaaggtgttaaattgatcacgttttagaccattttttcgtcgtgaaactaaaaaaaccaggcgcgaaaagtggtaacggttacctttgacatacgaaatatcccgaatgccgcgtgttaccgttgatgttggcggaatcacagtcatgacgggtagcaaatcaggcgatacgtcttgtacctctatattgagactctgaaacagagactggatgccataaatcaattgcgtgtggatcgcgcgcttgctgctatggggcctgcattccaacaggtctacagtctactgccgacattgttgcactatcaccatccgctaatgccgggttaccttgatggtaacgttcccaaaggcatttgcctttacacgcctgatgaaactcaacgccactacctgaacgagcttgaactgtatcgtggaatgtcagtacaggacccaccgaaaggtgagcttccaattactggtgtatacaccatgggcagcacctcgtccgtagggcaaagttgttcctctgacctggatatctgggtctgtcatcaatcctggctcgatagcgaagagcgccagttgctacaacgtaaatgtagtctgctggaaagctgggccgcctcgctgggtgtggaagtcagcttcttcctgattgatgaaaaccgcttccgtcataatgaaagcggcagcctggggggcgaagattgtggctccacccagcatatactgctgcttgacgaattttatcgtaccgccgtgcgtctcgccggtaagcgtattctgtggaatatggtgccgtgcgacgaagaagagcattacgacgactatgtgatgacgctttacgcgcagggcgtgctgacgccaaatgaatggctggatcttggtggcttaagctcgctttctgctgaagagtactttggtgccagcctttggcagctctacaagagtatcgattccccatacaaagcggtgctgaaaacactgctgctggaagcctactcctgggaatacccgaacccacgtctgctggcgaaagatatcaaacagcgtttgcacgacggcgagattgtatcgtttggcctcgatccatactgcatgatgctggagcgcgtcactgaatatctgacggctattgaagatttcacccgtctggatttagttcgccgctgcttctatttaaaagtgtgtgaaaaacttagccgtgaacgcgcctgcgtaggctggcgtcgtgaagtgttaagccagttggtgaaagagtgggaatgggacgatgctcgtctggcaatgctcgataaccgcgctaactggaagatagatcaggtgcgtgaggcgcacaacgagctgctcgacgcaatgatgcagagctaccgtaatctgatccgctttgcgcgtcgcaataaccttagcgtctccgccagcccgcaggatatcggcgtgctgacgcgtaaactgtacgccgcgtttgaagcattaccgggtaaagtgacgctggtaaacccgcagatttcgcccgatctctcggaaccgaatctgacctttatttatgtaccgccgggccgcgccaaccgttcaggttggtatctgtataaccgcgcgccaaatattgagtcaatcatcagccatcagccgctggaatataaccgttacctgaataaactggtggcgtgggcatggtttaacggcctgctgacctcgcgcacccgtttgtacattaaaggcaacggcgttgtcgacttgccgaagttgcaggagatggtcgcagacgtgtcgcaccatttcccgctgcgcttacctgcaccgacaccgaaggcgctctacagcccgtgtgagatccgccatctggcgattatcgttaacctggaatatgacccgacggcagccttccgcaatcaggtggtgcattttgatttccgtaagctggatgtcttcagctttggcgagaatcaaaattgcctggtgggtagcgttgacctgctgtatcgcaactcgtggaacgaagtgcgtacgctgcacttcaacggtgagcagtcgatgattgaagccctgaaaaccattctcggcaaaatgcatcaggacgccgcaccgccagatagcgtggaagtcttctgctacagccagcatctgcgcggcttaatccgtactcgcgtgcagcaactggtttctgagtgtattgaactgcgtctttccagcacccgccaggaaaccgggcgcttcaaggcgctgcgcgtctccggtcaaacctggggcttgttcttcgaacggctgaatgtctcggtacagaaactggaaaacgccatcgagttttatggcgctatttcgcataacaaactgcacggcctgtcagtgcaggttgaaaccaatcacgtcaaattaccggcggtggtggacggctttgccagcgaagggatcatccagtttttcttcgaagaaacgcaagacgagaatggctttaatatctacattctcgacgaaagcaaccgggttgaggtgtatcaccactgcgaaggcagcaaagaggagttggtgcgtgacgtcagtcgcttctactcgtcttcgcacgaccgtttcacctacggctcaagcttcatcaacttcaacctgccgcagttctatcagattgtgaaggttgatggtcgtgaacaggtgattccgtttcgcaccaaatctatcggtaacatgccacctgccaatcaggagcatgacgcgccgctgttgcagcagtatttttcttgatgctaatgccggaaagcgaggcttatccggcattagctcttaacgaaaactgacggtttctcccgcctgctgcgtcgcggcctgttccaataaatcccagaaggtttcgccgctgcgatcgcaaatccactcatcgcctttcagatcaaaatggtagccgccctgtttggttgccagccatacctggtgcagcggttcctggcggttgataatgattttgctgccgttctcaaaggtaatggttagtacaccgccgttgatttcacagtcgatatcgctgtcgccaccccagtcgtccagatgttcttcaatggtcagccacagttgatcagccaggcgatgaaattcactgtcgttcattgttgtatcctgtttttaagtgatggcggcagtatagcggcatggggtcagggcttcaaagtttgcccgtctgctgctgcgttccggcatgattcatccgtcaccggaataataatgtctctgttgtgaagttcatgcacattctcttctctgacgcgtgttttcgccgggcagggggagggcgtaatccttacctctgtatcggtccatgtataaacattgcgatcgtcataagcaaagcgatcgtttttagttagcgggccgttgttagttggaataatttgcacgctcttgcgtgaccgtaattggtggataaagtaagcatgctgtttgccgcgattaaatgagtgatcaatgaccaggtctggcgaatccagcgggattatttcaagctggtcttcaccaaaagtcgataattttgttacatacagccgatctttatactgcgcaatattgtcagtaatcagatgaaattgttcaggttcaataccttgtaggtctatccactggctccactgacggtcgggcgtgagctgtttacgccagcgaacgcgactttcccctacttcaaaagagacgtcatcatctacgggtatcgctttgccagataattgaccaaagggataacgatgcagacccttattgtcgcgaaaaaccagcagtgaatgaggtatccagcgaattatctcaaatgagtctgcattcgccgtaaggtgagcgccatttaaataaatattctgcccactgcggataagcagatcattggaatacaaatttctgtttacactcataagacgtggattaataccccaccatcttttttctaatacagtaacattactgctgctcccctgacgtcgaccggacaagtagagatttttactatccaccagcgtggtagagttaccttcgatagcttttagtgtcgccagatcaacacgtgacgcgccgctattactttcggtgcgctgtccgtcaaaatagaggctatatttatcgaccgcgaagcggcccatagcttgaaagctggcaatatcgacagtgggtgttcccggtggattgctaacgattttgccacgccagagaataacgcggccgtctgtcatccagtggtatgactcattttttatgcttatttcatcggaaggtatataacccgtcttcccagagatatttttcacaaggcgcaaatcggccctgttcatctccggaaattgggcaatgattttcttatccccccaataacctttaccgtaagacatgacaccgtgatcattgtaatagtcgaaccctatggcctgtacaggaggtgtcagaaatgagttccccaacaggatgagtgcaactgtgattatttgaccattcattttgttgcctcattgcgtggggcaggaataaattcgccgtcatcggtaatttttccgtccagatatcccgttttgtaatttacgccatagccatatcccgaatgttgttccttccagattaagcgaacttgtttcggatcagcggtgcggtatcgccagagctgcgcgccatcaaagctgtaaacgtagcggttatcgcgggcataccatctgcgcaaaaagggatggtcattaagatgggcttcgcgttcatccggagagcggttatccagtaagatcagcggtccgtcagattcaaacacgtgtaaactggaatggtttacccacccttcggcatgcgtaagtaaatagccgtggcgtttcccggcgttgaaacgtttgttgataataagattggggtcatcgagttttacgatctccaacttgcggtcaccagactctgtttcgatgatggtataaagcgaatcctgatactgggcgacagcatcactgatggggtggaactgttcaggatcgagtccggataattcttcctgtttacaagcaggccctttacgccagaacactttcttttcctgcagagaaaaatccagacagtgctttgttaaatcttcatcccacgccagattttccttgtcgaggactttacgctgcagcccgtttttatcacgccaggtgaagagtgagccgggcatccagcgcacgacggaaaaggtgtccgggtcggcatccagttgttctccgttgatcatgattttcgtctgtgtgcgggctagcgtatcccaggggccaaatggggcaggaaggcagggattaaatgctgtagagaatttaccgcgctgatcccatgacttttgagccagtaccgtaaaggtgtcgggatcatcaaggcgctgaccatttgcgtaaagatagtgcttgtcacggagaatcaaacctagccagtctggtttccattgcgggttaaattctacctgacgcaacgttcggcggtttagttgctggttgctatcggtgcgtttgccttcgtaatagaggctgtacttatctgcggcaaaatcaccccatgcctgaaatgacgagatatcgactggcggtgtgcctggagggttttgcacaatctcgccagcgtagagaatagcgcgaccatcgctatagtaagagtaatggggaagagttgcgtttgcgccgctgtagacaacgtctgtcatgagattggtagccgggggcaccgtttcccaatcctccagtttggttgggtcaattagcaaattcggtaacagacgcagacgcttgtagttaatctgcggtagcgaaagattggtcttttcataagggcgcaaatacaccacgccttttccctgtttctggtaaatattatgttccggctcatcaagccgacatccccatgccgacgataaaaacaacgaacaagacaataaacaaaccacattgcgatagtgcataaagccatcctggcgcgaggtgccgatcacgaaactaccagcaaaacataaatcgccacgtgtaagcgttatactcgcagcaattcctcacttttcagacttcataaagagtcgctaaacgcttgcttttacgccttctcctgcgatgatagaaagcagaaagcgatgaactttacaggcaatccataatgaaaaacgtgtttaaggcactcactgtattacttactctcttcagcctgacgggctgcggtctgaaaggtccgctctatttcccgcctgcagataaaaacgcaccgccgccgaccaaaccggtagagacgcaaacgcaatccacggtgccggataaaaacgaccgcgccactggcgatggtccatcccaggtgaattactaaaagtcagtttctgtacccgcgtgattggagtaaatgatgcagttctcgaaaatgcatggccttggcaacgattttatggtcgtcgacgcggtaacgcagaatgtctttttttcaccggatctgattcgtcgcctggcggatcggcacctgggggtagggtttgaccaattgctggtggttgagccgccgtatgatcctgaactggattttcactatcgcattttcaatgctgatggcagtgaagtggcgcagtgcggcaacggcgcgcgctgctttgcccgttttgtgcgcctgaaagggctgaccaataagcgcgatatccgcgtcagcaccgccaacgggcggatggttctgaccgtcaccgatgatgatctggtccgcgtaaatatgggcgaacccaacttcgaaccttccgctgtgccgtttcgcgctaacaaagtggaaaagacctatatcatgcgcgccgccgagcagacaatcttatgtggcgtggtgtcgatgggaaatccgcactgcgtgattcaggtcgatgatgtcgataccgcggcggtagaaacgcttggtcctgttctggaaagccacgagcgttttccggagcgcgccaatatcggttttatgcaagtggttaagcgcgagcatattcgtttacgcgtttatgagcgtggggcaggagaaacccaggcctgcggcagcggcgcatgtgcggcggtggcggtagggattcagcaaggtttgctggccgaagaagtacgcgtggaactccccggcggtcgtcttgatatcgcctggaaaggtccgggtcacccgttatatatgactggcccggcggtacatgtctacgacggatttattcatctatgaagcaaccaggggaagaactgcaggaaacactcacggagcttgatgaccgggcggttgtcgattatctgattaaaaatcctgagttttttatccgcaatgcgcgcgcagtagaagcgatacgtgtgccgcatccggtacgcggcaccgtttcgttggtcgagtggcacatggcccgcgcacgtaatcatattcatgttctggaagagaacatggcgctgttgatggaacaggcaatcgccaacgaaggcctgttttatcgtctgctctacctgcagcgcagtctcaccgccgccagcagtctcgatgatatgctgatgcgctttcaccgctgggcgcgcgatctcggcctggcaggtgcgagtctgcgcctgtttccggatcgctggcgcttaggtgcgccgtcgaactacactcatctggcattaagccgtcagtctttcgaaccgctgcgtattcagcgtctggggcaggaacagcactatctgggaccgcttaacggaccggagctgctggtggtgctaccggaagcgaaagcggtgggatcggtggcgatgtcgatgctgggaagcgatgctgatttgggtgttgtgctgtttaccagtcgcgatgccagtcactatcaacaagggcagggaacgcagttacttcatgaaattgcactgatgttgccggagcttctggcgcgttggattgaacgcgtatgaccgatttacacaccgatgtagaacgctacctacgttatctgagcgtggagcgccagcttagcccgataaccctgcttaactaccagcgacagcttgaggcgatcatcaattttgccagcgaaaatggcctgcaaagctggcagcaatgtgatgtgacgatggtgcgtaattttgctgtacgcagtcgccgtaaagggctgggagctgcaagtctggcgttacggctttctgcgctacgtagcttttttgactggctggtcagccagaacgaactcaaagccaacccggcgaaaggtgtttcggcaccgaaagcgccgcgtcatctgccgaaaaacatcgacgtcgatgatatgaatcggctgctggatattgatatcaacgatcccctcgctgtacgcgaccgtgcaatgctggaagtgatgtacggcgcgggtctgcgtctttccgagctggtggggctggatatcaaacacctcgacctggagtctggtgaagtgtgggtgatgggaaaaggcagcaaagagcgccgcctgccgattggtcgcaacgctgtggcgtggattgagcactggcttgatttgcgcgacctgtttggtagcgaagacgacgcgctttttctgtcgaaactgggcaagcgtatctccgcgcgtaatgtgcagaaacgctttgccgaatggggcataaaacaagggctgaataatcacgttcacccgcataaattacgtcactcgttcgctacccatatgctggagtcgagcggcgatcttcgtggtgtgcaggagctgctgggtcatgccaacctctccaccacgcaaatctatactcatcttgattttcaacaccttgcctcggtgtacgatgcggcgcatccacgcgccaaacgggggaaataatgcgtttttaccggcctttggggcgcatctcggcgctcacctttgacctggatgacaccctttacgataaccgtccggtgattttgcgcaccgagcaggaggcgcttacctttgtgcaaaattatcatccggcgctgcgcagcttccagaatgaagatctgcaacgcctgcgccaggcggtacgggaagcggaacccgagatttatcacgacgtgacgcgctggcgttttcgttcgattgaacaagcgatgctcgacgccgggctgagtgccgaagaagccagtgcaggcgcacacgcggcaatgatcaactttgccaaatggcgcagccggatcgacgtcccgcagcaaacccacgacaccttaaaacagctggcgaagaaatggccgctggtggcgatcaccaacggtaacgcccagccggaactgtttggtttggggcattattttgagtttgtgctgcgcgctggcccgcacgggcgctcaaaaccgttcagcgacatgtacttactggcggcggaaaaacttaacgtgccgatcggtgagatcttacatgtcggggacgatctcaccactgacgtgggtggggcaattcgcagcggaatgcaggcctgttggatcagaccggaaaatggcgatctgatgcaaacctgggacagccgtttactgccgcatctggaaatttcccggttggcatctctgacctcgctgatataatcagcaaatctgtatatatacccagctttttggcggagggcgttgcgcttctccgcccaacctatttttacgcggcggtgccaatggacgtttcttacctgctcgacagccttaatgacaaacagcgcgaagcggtggccgcgccacgcagcaaccttctggtgctggcgggcgcgggcagtggtaagacgcgcgtactggtgcatcgtatcgcctggttgatgagcgtggaaaactgctcgccgtattcgattatggcggtgacgtttaccaacaaagcggcggcggagatgcgtcatcgtatcgggcaactgatgggcactagccagggcggtatgtgggtcggcaccttccacgggctggcgcaccgcctgctgcgtgcgcaccatatggacgccaacctgccgcaggatttccagatcctcgacagtgaagaccagctacgtctgcttaagcgtttgatcaaggcgatgaatctcgacgagaagcagtggccgccgcgtcaggcaatgtggtacatcaacagccagaaagatgaggggctgcgtccgcatcatattcagagctacggcaacccagtggagcaaacctggcagaaggtgtatcaggcgtatcaggaagcctgtgaccgcgcgggtctggttgattttgctgaattgctgcttcgtgcccacgaattatggctcaacaaaccgcatatccttcaacattaccgcgaacgtttcaccaatatcctggtggatgaattccaggacactaacaacattcagtacgcgtggatccgactgctggcaggcgatactggcaaagtgatgatcgttggcgatgacgaccagtcaatctacggctggcgcggggcgcaggtcgagaatattcagcgtttcctcaatgatttccccggtgctgaaactatccgtctggagcagaactaccgctctaccagcaatattctgagcgccgcgaacgccctgattgaaaacaacaacgggcgtctgggtaaaaaattgtggaccgatggcgcggacggtgagcctatttccctttattgcgcttttaacgaactcgacgaagcgcgttttgtggttaaccgcatcaaaacctggcaggacaacggcggggcgcttgccgagtgcgccattctctaccgcagcaacgcccagtcgcgtgtgctggaagaggcgttattgcaggcgagtatgccgtatcgtatttacggcgggatgcgcttcttcgaacgccaggaaatcaaagatgcgctctcgtatctgcgcctgattgccaaccgcaacgacgacgcggcctttgagcgtgtggtgaatacgccaacgcggggtattggtgaccggacgttggacgtggtacgtcagacatcgcgcgatcgccagttaacactctggcaggcatgtcgtgaactgttgcaggaaaaagccctcgccggacgtgctgccagcgccttacagcggtttatggagctgatcgacgccttagcgcaggaaactgccgatatgccgctgcatgtacagactgaccgggtaattaaagactccggcctgcgcaccatgtacgagcaggagaagggcgaaaaaggtcagacgcgtatcgaaaacttagaggaactggtgacggcaacgcgccagttcagctacaacgaagaagacgaagatttaatgccgctgcaggcattcctctcccatgcggcgctggaagcgggcgaggggcaggcggatacctggcaggatgcggtgcagttgatgacgctacactcggcgaaaggtctggaattcccgcaggtgtttatcgttggtatggaagagggcatgttcccaagccagatgtcgctggatgaaggcgggcgtctggaagaagaacgccgtctggcctacgttggcgtaacccgcgcgatgcagaaactgacgctgacctacgcggaaacccgccgtctgtatggcaaagaggtttaccatcgcccgtcgcgctttatcggtgagttgccggaagagtgtgtggaagaggtgcgcctgcgcgccacggtaagccgcccggtcagccatcagcgtatgggtacgccgatggtcgagaacgacagcggctataagctcggccagcgcgtacgccacgctaagtttggtgaaggcaccatcgtcaatatggaaggcagcggcgagcatagccgtttgcaggtggcattccagggccagggtattaaatggctggtggcggcttacgcccgactggagacggtataatttacgattccgttgccagatgcggtgcgccacaccgcatccggcatcagtaacttacttagtgcacttcttcacatcaatattccagtcagcaccagacgcaacctgatgtttctgcgcgaaattatccatattcagcgccacggaaacattcaataagctgttcagatacaccatcggctggccttccggcacatcgccgaagcttgcgacatacggcattttccctgcgtatttttgctgggaaccttcggaaatggtcacacacaacgtgtcgttgagtttgattcctgcctgattcagcaactcgtcgctgatattgctccagacgttgccgtactgaatatcgagaatcgggatattgcccttcacttcaccttttgttgctttggctttctgataagaaagttcgacaacttttgcaggaagctctggccccacctgctcgaacgtgatcgccccggaagccagacgtgcaccggtgtaggcatacacatcacgaccgtggaaggtatatgacttttcggaacctttcagacggttggttttttcatcgatttgccggacgctctcaatacccagcgattccgccaccaacgtgagcgtaccgttatctggtgaaacgaagtactgaccgtttttggttttcagcactaccgatttacggtctgtaccaacaccaggatcgaccacgctaacaaacaccgaaccttgcggccagtaactggcagtctgatacaggcggtaagcgccttcccagatgttatatggtggaatttcgtgtgttaaatcaaatattttaagattatggtcaacgccgaaagcgacccctttcatcgtcgagacggcgccatctttcaggctaaaatccgtttgtaaaatcaaagcgttatccgcataagcggatgatgaccccagacaggttaataaaaataatgttgcgagcgtttttttcatttttgtttcccttcatttatctgatgattttccagctgtgtagccagccccagtttgtctggcctcctcgagtgtacaatgtttaacctttctgctcgacggaaatcatggtgacaaaaggatagcgttgccacgggattgcctcgcctttcatatacatatgtgaaattgtgccatcaagataaagcagctgctcaacgttcagtttcgctttggcataacaggcaaaatcataaaaatttgtcgcctgctggctcaacaaaaacacggcgttcccatgtttattaatcccaacaccgttacgaattttacgtgaggcgacgttgggatgaatacgcggattaattacaccgttttccatcaacaatggccctgactgcaccgcaaactgaatctctttactggttttaaaggcatccagacgaacgatgccgactttatctcccgcgacataaaacactccgccaggacgaataaagaaattcccttcacctgaagcgagatttaacgccaccttctgctgaccgttttcgatgtacaaaccgagcggcgcatagctttcatcatagatgccgccgttcatcgccatctgcacctgaccctgactattaatatccgccagcagagcatgtaacgttccccacgcttcgccattggctttttgccagtacattttcacccgctctgtttgaggattaacggtatacgcctgtacggtcagcgtcggatctgagggtgcgcaatcatcagcggcaacagcaaacaagggaagtaaggtgagggtgagaaaaatccgtttgagattcaaggtgatcattcctttaccaatgaatagccgatgcgccattataggccctgaatgtgggatttttttatcctgttagcgaccttgacgagtaccaaaaagcgcgaagttcaactattgttctgtggtgttctgttgcgtgttgacggcaaaattttgctggcgtaacatgcgcgcacgatcactctaagaggacattcgccttggacacacccagtagatactggctcattatcctgtcatccaggatcaactcctaaggctatccctttttgctgatagccttagcggttgtcagcgacctcaatttttcccgtcgcgctgagtcaggctgtttaatggtctgaaacccaatttgtttctgtgtgcccaccgaactgtccgatattttaagcattgggagtcccggtcatgctgagcgcatttcaactggaaaataaccgactgacccggctggaagtcgaagagtcacaaccccttgtaaatgcagtatggattgatcttgtcgaaccggacgacgacgagcgactgcgcgtacaatctgaacttggccagagcctggcaacccgcccggaactggaagacatcgaagcatcggcacgtttctttgaagacgatgacggcctgcatattcactccttcttcttctttgaagatgcggaagatcacgccggtaactccactgtggcatttaccatccgtgatggtcgtctgtttactctgcgtgagcgtgaactgcccgcttttcgtctgtatcgtatgcgtgcccgtagccagtcaatggtggacggtaacgcctacgagctgctgctggatctgttcgaaaccaaaatcgaacagttggcagatgaaattgaaaatatctacagcgacctggagcagttgagccgggtaattatggaagggcatcagggcgatgagtacgacgaggcgctctccacgctggcggaactggaagatatcggctggaaagttcgcctgtgtctgatggatacccagcgcgcgctcaacttcctggtacgtaaagcacgcttaccgggtgggcaactggagcaggcgcgtgaaatcctgcgagatatcgaatccctgctgccgcataacgaatccctgttccagaaggtgaacttcctgatgcaggcggcgatgggctttatcaatatcgagcagaaccgcatcatcaaaatcttctcggtggtatccgtggtgttcctgccaccgacgctggtcgcttccagctacgggatgaactttgagtttatgccggaactgaagtggagcttcggctacccaggcgcgattatctttatgatcctcgcgggcctggcaccgtatctgtactttaagcggaagaactggttgtaatataaatgccgggtaaagattgttctttatccggcttattgctgaaaattgtctttttcaaagtcatgcgggttgaacactcgctctatcttattttcctgggttagttgatactcattgttatcagcaataaaaaaatgagtattacggtaaggatattcattaataaccattaaatagttttttacgatgcaattatcattgctcttaatcgtcgggaaacagtagagatcttcatacggcccttcgatatattttttatagtcagtgaagccattaccgatatcaataacataccaggtatgccaactaccttctggtaggggattttgacttttaatttcatcctgatgcttcagataccaatttattttatcgctatcagtccatggcagatgatcaacgaccagaaagactgaattgccagcatcagagtatgtatacaaaatctgtacaggacgcaatgtccataaattatagatgcagcatagaagaaataaatataatataattttctggagttttcttttcatagataattttcgattctttcgatagtgttaaaattggtgaaaaaaggtttgaaagcaaagtctttatgccgttgtaaaaagaaccatatgcgaaaaaatctatacttgttgtaaatcttgttttttatatcagtcacatccaaaccaaagtggtcttgtgctatgaaatgaatggtagcgctccagcccataggatatttttgaaaatttaaaagagatattttttgagctgagatatcatgaatgctgattcccaggccattaaaattatctttaaaatcattgaatttatttagtcttgatgaaagtaattcggtcttaatcttttgtaggagaagaggccggtatcctatcgtaggtgttgaagaaatatcattttcgatacattctttgattacacgtattgggctattataatcatatttgtttattcgttcatgaaaagataagttcaattcctggctatggaaactgttgccatttccatatctaaaatgatcaatcagatcctggatgagtgttttgtattgtccaaaaaaggaaaacatttttgccagatctttcatttctgcaaataaaatatcaatacattcactttgtgatatttttgttccagaagttggaacactaaaagcaccataagtagaattcggcccaggaaaatggtatttaatgaggcggtaaggatcaacttttgcagagatgtcgcttaagccgagtgagagaaaatcttgttcttccatatccccatactgcatatcatcagcagaaaaatcatcgaataaagtaatagtttcgaaaagtgtacagggcatattaattgatgagcctaatatgttgttcatttatattctcctttcttataattaagggcaatgttaatttgataagaaataatagggtaaaaaaattttaaaaaagaaatgcacttcacatttttcattacattctgaagagaacttggttaatgattggtcttgctcatcgctaataacataatgctgaatttaccaaaaatgaaatttattaaagcaaatgaaaatatacaacgacgtctggaaattctgcctttccttatgtgagtctcctgtcagcatggcaatatgcccactctcatgcaagagtcggcatattttttcagaatatatttattttttatttggacgttctatgctgcgtataaatcgcatccatcacaaaaattgccagcgccacccaaataaaggcgaaagttaccatcttatcggcacccggtttttcaccataaaacgtcacagccagcaggaacatcagcgtcggaccaatgtactggaaaaagcctaacgttgagagacgcaggcgtgtcgccgctgcagtaaaacacaacagtggcacggtggtgacaataccggcggcgatcagcagtaaattcagcgacatcgggttttgccccatatgactggttgagctgtcggcaatagcaaacaggtaaatcgccgccacgggcagcaaccacatagtttcgattaacatgccggtttgcgcttcaacagcaatcttcttgcgcaccaggccgtagaaagcaaaactaaacgccagccccagcgcgatgatcggcagtgaaccaaaagtccacaactgaaccagcactccacatatcgccagaatcaccgccagccattgcatccggcggaatcgctcgccgaggaaaatcatccccagcacaatgttcaccagcgggttaataaagtaaccaaggctcgcttccagcatatggtgattgttcaccgcccagataaacagtagccagttgccgccaatcagcacggcagagactgccagcataaaaattttctgtggcgtctgaatcagcgtttttaaataggaccactggcggcaaatgctcatcagcaccaccataaagaaaaacgaccagatcacgcgatgcgtcaggatctcatcggcgggcacgtagtaaatcagtttgaagtacgctggcgcaataccccaaataaaataagcggcaagagcgagtaatacgccctgccgcgtttgttttgcatccatcgggaatactcatttttaattggtaacagcagtttacctgcttttatgtcttcaacctaccatataggtggcggtggcactggcaatataaagctgttcttcattgtgtaattcaacgcgggcgacggcgactttattgcctgcacgtaacaggctactggtagcagtaaaacgctcgcctctgcctgggcgcagataatcgacgcgaagatcaatggtccccatccgcgatagccgctggcgtagttcatcttcactgatggtttcgtggcgggttaaggtacttcccacgcacaccagacctgcggcgacatccagcgccgacgcaatgaccccgccgtgtaaaatgctttgcgcccagttgcccaccatcatcggctgatttttaaaggccagctgtgcgaactctttttcgtaacgctccagttccatccccaatgcgcggttaaatggcatgtgataaacaaacatctcacccactaatttgagggcttgttcagcggtcagtacggcagacataacatccttacacttcattagttaatgaaatgttgattttatgcttctttattgttggtttccactttaggaagggataactaacggctatggagttaagtatgtaaaatagcccgcagaaaatattcaccttatcaataattcgttacggagaacacgagcgatgcggactctgcagggctggttgttgccggtgtttatgttgcctatggcagtatatgcacaagaggcaacggtgaaagaggtgcatgacgcgccagcggtgcgtggcagtattatcgccaatatgctgcaggagcatgacaatccgttcaccctttatccttatgacaccaactacatcatctacacccaaaccagcgatctgaataaagaagcgattgccagttacgactgggcggaaaacgcgcgtaaggatgaagtaaagttccagttgagcctggcgtttccgctgtggcgtgggattttggggccaaactctgtactgggcgcctcctacacacagaaatcctggtggcagctttctaatagcgatgagtcatcaccgtttcgtgaaactaactacgaaccgcaattgttcctcggttttgccacggattacaactttgctggctggacgctgcgcgatgtggaaatgggctacaaccacgactcaaacgggcgttcagacccgacttcccgcagctggaaccgcctttatacccgcctgatggcagaaaacggtaactggctggtagaggtgaagccgtggtatgtggtggggaatacggacgataacccggacatcaccaaatatatgggttactaccagcttaaaatcggctatcacctcggtgatgcggtactgagcgcgaaagggcagtacaactggaacaccggttacggcggcgcggagttaggcttaagctacccgatcaccaaacatgtgcgcctttatactcaggtttacagcggttacggcgaatcgctcatcgactataacttcaaccagacccgcgttggtgtgggagttatgctaaacgacctgttttgatgaatggttggcaaatctggaatccagcatccaggattaccctctcagagactaaaagcattgcagtttctcgcgcaggcgctgaaaatagcgcctgtttttatttcaggcaatcggggtgaatgtggcgcaggcggaagtgttgaatctggagtccggagctaaacaggttttacaagaaacctttggctaccaacagtttcgccccggccaggaagagattatcgacaccgtactttccggtcgcgattgcctggtcgtcatgcccactggtggcggaaaatccctttgctatcaaatccctgccttattgctaaacggccttaccgtggttgtctcaccgctgatttcgttgatgaaagatcaggtagatcaactgcaagccaacggcgtggcggcggcgtgccttaactcgacgcaaacccgcgagcagcagcttgaagtaatgacaggctgccgcaccgggcaaatccgcctgctttatatcgcgccggaacgcctgatgctggataactttcttgagcatctggcgcactggaatccggtgttattagccgttgatgaagcgcactgtatctcccaatggggtcacgatttccgcccggaatacgctgccctcggtcagctgcgtcagcgttttccgacgctcccgtttatggcgctgactgccacagccgatgacaccacgcgccaggatattgtgcgcctgctggggctgaacgatccgctaattcaaatcagcagttttgaccgtccgaatattcgctacatgctgatggagaaattcaaaccgctcgatcagttgatgcgctacgtacaggaacaacgcggtaagtcgggaattatctactgcaacagccgcgcaaaagtagaagacaccgctgcacgcctgcaaagcaagggaattagcgcggcggcctatcatgccgggctggaaaataatgttcgcgctgatgtgcaggaaaaattccagcgcgatgacctgcaaattgtggtggcgacggtggcgttcggcatgggcatcaacaagcctaacgttcgcttcgtggtgcattttgatattccgcgcaatatcgaatcctattatcaggaaactggacgcgccgggcgtgatggcctgcccgcggaagcgatgctgttttacgatccggctgatatggcgtggctgcgccgttgtctggaagagaagccgcaggggcagttgcaggatatcgaacgtcataaactcaatgcgatgggcgcgtttgccgaagcgcaaacttgtcgtcgtttggtattgctgaactattttggcgaagggcgtcaggagccgtgcgggaactgcgatatctgcctcgatccgccgaaacagtacgacggttcaaccgatgctcagattgccctttccaccattggtcgtgtgaatcagcggtttgggatgggttatgtggtggaagtgattcgcggtgctaataaccagcgtatccgcgactatggtcatgacaaactgaaagtctatggcatgggccgtgataaaagccatgaacattgggtgagcgtgatccgccagctgattcacctcggcctggtgacgcaaaatattgcccagcattctgccctacaactgacagaggctgcgcgtccggtgctgcgcggcgaatcctctttgcaacttgccgtgccgcgtatcgtggcgctcaaaccgaaagcgatgcagaaatcgttcggcggcaactatgatcgcaaactgttcgccaaattacgcaaactgcgtaaatcgattgccgatgaaagcaatgtcccgccgtacgtggtgtttaacgacgcaaccttgattgagatggcggagcagatgccgatcaccgccagcgaaatgctcagcgttaacggcgttggtatgcgcaagctggaacgctttggcaaaccgtttatggcgctgattcgtgcgcatgtcgatggtgacgacgaagagtagtcagcagcataaaaaagtgccaggatgaagactccgtaaacgtttcccccgcgagtctaatgtatgttgatgttattcctcaccgtcgccatggtgcacattgtggcgcttatgagccccggtcccgatttcttttttgtctctcagaccgctgttagtcgttcccgtaaagaagcgatgatgggcgtgctgggcattacctgcggcgtaatggtttgggctgggattgcgttgcttggcctacatttgattatcgaaaaaatggcctggctgcatacgctgattatggtgggcggtggcctgtatctctgctggatgggttaccagatgctacgtggtgcactgaaaaaagaggttgtttctgcccctgcgccacaagtcgaactggcgaaaagcgggcgcagttttcttaagggcttactgaccaatctcgcgaaccctaaagcgattatctactttggttcggtgttctcgctgtttgtcggtgataatgtcggcaccaccgaacgctggggcattttcgcgttgattattgtcgaaacactggcgtggtttaccgtcgttgccagcctgtttgctctgccgcaaatgcgccgtggttatcaacgtctggcgaagtggattgatggttttgccggggcgttatttgccggatttggcattcatttgattatttcgcgttaatgccagacgcgtcatcagagtaagtcggataaggcgtttacgccgcatccgacattattttcacgcatgcctcgccgatgctaacagcgctcccaccagcataaataacgagccgaaaatcttattcagcgccttcatctgctttggtcctttaatccatagagcaatccgttgagcaagggtggcgtaaccgatcatcacaataatatcgaccacaatagtggtgacgccgagcacgatatactgcatcagttgtggctgctgcggcatgatgaattgcggaaatagcgccgccagaaacacaatacttttgggattggtgagattcacaaaaactgcgcgctggaacaaatgtcgacgcgattgagtggaggccagcgatttaagatcaattgcgccagcggcgcgccattgctgtattcccagccaaatcaagtaagctgcgcctgcccacttcaacacttcaaacgcaatcactgagcgggaaaatagcgtccccaaccccacgccaaccagcacaatatgaatcgccagtccggtctgaagcccagcaatagacgccaccgcgccgcgataaccgtggttgagcgaggtggtcatggtgttgattgcgccagagcctggcgacaggcttaaaatgatcgatgtcagcaggtaggcaaaccaccattctaaggtcatgatgaactcccggtgtgtctatttttgtgccacaatacgctactgtcgcagcgttgtgtcaggcacgcttaaaaaaacgattttacgtggtttaagaggcagattacccgatgtttcagcagcaaaaagactgggaaacaagagaaaacgcgtttgctgcttttaccatgggaccgctgactgatttctggcgtcagcgtgatgaagcagagtttactggtgtggatgacattccggttcgctttgtccgttttcgcgcacagcaccatgaccgggtggtagtcatctgtccggggcgtattgagagctacgtaaaatatgcggaactggcctacgacctgttccatttggggtttgatgttttaatcatcgaccatcgcgggcagggacgttccggtcgcctgttagccgatccacatctcgggcatgttaatcgctttaatgattatgttgatgatctggcggcattctggcaacaggaggttcagcccggtccgtggcgtaaacgctatatactggcacattcgatgggcggtgcgatctccacattatttctgcaacgccatccaggtgtatgtgacgccattgcgctaactgcgccaatgtttgggattgtgattcgtatgccgtcatttatggcacggcagatccttaactgggccgaagcgcatccacgtttccgtgatggctatgcgataggcaccgggcgctggcgcgcgttgccgtttgctatcaacgtactgacccacagcagacagcgatatcgacgtaacttacgtttctatgctgatgacccaacgattcgcgtcggtgggccgacctaccattgggtacgcgaaagtattctggctggcgaacaggtgttagccggtgcgggtgatgacgccacgccaacgcttctcttacaagctgaagaggaacgcgtggtggataaccgcatgcacgaccgtttttgtgaactacgcaccgctgcgggccatcctgtcgaaggaggacggccgttggtaattaaaggtgcgtaccatgagatcctttttgaaaaggacgcaatgcgctcagtcgcgctccacgctatcgttgattttttcaacaggcataactcacccagcggaaaccgctctacagaggtttaaatttcttatgtaccaggttgttgcgtctgatttagatggcacgttactttctcccgaccatacgttatccccttacgccaaagaaactctgaagctgctcaccgcgcgcggcatcaactttgtgtttgcgaccggtcgtcaccacgttgatgtggggcaaattcgcgataatctggagattaagtcttacatgattacctccaatggcgcgcgcgttcacgatctggatggcaacctgatttttgctcataacctggatcgcgacattgccagtgacctgtttggcgtggtcaacgacaacccggagatcattactaacgtttatcgcgatgatgaatggtttatgaatcgccatcgcccggaagagatgcgctttttcaaagaagcggtgttcaattatgcgctgtatgagccgggattgctggagccggaaggcgtcagcaaagtgttcttcacctgcgattcccatgaaaaacttctgccactggagcaggcgattaacgctcgctggggcgatcgcgtcaatgtcagtttctctaccttaacctgcctggaagtgatggcgggcggcgtttcaaaaggccatgcgctggaagcggtggcgaagaaactgggctacagcctgcaagattgtattgcctttggcgatggaatgaacgatgccgaaatgctgtcgatggcggggaaaggctgcattatgggcagcgcgcatcaacggctgaaagatctgcatccagagctggaagtgattggtactaacgccgaagacgcagtgccgcattatctgcgtaagctctatttatcgtaattgttctttatttggtcagttgtcaacctgatacttcgctacaatggatactcgttaatcaaagagttttccattgtggcgctacttatcatcaccacgattctgtgggccttctcctttagcttttatggcgagtaccttgcggggcacgtcgatagctattttgcggtgctggtgcgcgttggtctggcggcactcgtttttctgccgtttctgcgcacccgtggcaatagcctgaaaacggttggcctgtatatgctggtgggcgcgatgcagctcggtgtgatgtatatgctgagtttccgcgcctatctctacctgacggtctccgaactgttgctgttcaccgtactgacgccgctctacatcacgctgatttatgacatcatgagtaagcgccgtctgcgctggggctatgcttttagcgccttgttggcggtgattggtgccgggattattcgctatgatcaggtcaccgaccatttctggactggcttattgctggtgcaactctccaatatcacttttgccatcggcatggtgggttacaaacgtctgatggaaactcgcccgatgccgcagcataacgcctttgcgtggttctatcttggcgcgttcctggtggcagtgattgcatggttcttgctgggaaatgcgcagaaaatgccgcaaaccacgttgcaatggggcattctggtgtttcttggcgtggtggcttccgggattggctactttatgtggaactacggcgcgacgcaggtggacgccggaacgctgggcattatgaataatatgcacgttccggcagggctgctggtaaacctggctatctggcaccaacagccgcactggccaacgtttattacaggcgcgctggtgatcctggcctcactgtgggtgcatcgtaagtgggtcgctccgcgctcttcacaaacggcagatgatcgcaggcgtgattgcgcgctgaacgaataaacgcttctgtaatcggctgacgctgctcgccatcgcgcacggcggcgtacagtcggctccacaagccttcgcccagggttttggtgaccaccagaccctggcgttcaaaactctccaccacccaatgcggtagtgcggcaatacccatccgtgcggcaaccatctgaatcaacaataaggtgttatcgacgcttttcagtgacgggctgacgcctgctggctgaagaaaatgcctccagacatccagtcggctacgctgcaccggataaatcaacagcgtttcgctggcgagatcttccggtgtaatacgcgtttttgccgccagtggatggtcaggtgctaacaccagacgcacttcatagtcgaacatcggcgaataatgcaggccactgcgcggcagaatatcggacgtcatcaccagatccagctcgccctgttgcaacgcaggctgcggatcaaacgttacgcccgatttaaaatccatctccacctgcggccagttcttatggaaactttctaatgcgggcgtcagccactgaatacagctatggcactctatggcaatgcgcaggcgcgtctgctgcggttcattgcaggcttgcagtgcctggctaatttgcggcagcacctgatttgccagttgcaacaggatttctccctgcggtgtaaagcgaagcggctggcttttacgcacaaatagccggaagccaaggcgttgttccagatcgctaaactggtgagacagggcggattgcgtttgatgcaacgtcgccgcagcggctgcgagtgagccgcagttccgcaacgcttgtagcgttttcaggtgttttacttcgatcatgaaagtccttcacttcggcatgaataatttgcgcttgaggaatatacagtaaccgccaattatggatgtgtaaacatctggacggctaaatactaaaaattccataaggggcatataatgacaattcttaatcacaccctcggtttccctcgcgttggcctgcgtcgcgagctgaaaaaagcgcaagagagttattgggcggggaactccacgcgtgaagaactgctggcggtagggcgtgaattgcgtgctcgtcactgggatcaacaaaagcaagcgggtatcgacctgctgccggtgggcgattttgcctggtacgatcatgtactgaccaccagtctgctgctgggtaatgttccgccacgtcatcagaacaaagatggttcggtagatatcgacaccctgttccgtattggtcgtggacgtgcaccgactggcgaacctgcggcggcagcggaaatgaccaaatggtttaacaccaactatcactacatggtgccggagttcgttaaaggccaacagttcaaactgacctggacgcagctgctggaggaagtggacgaggcgctggcgctgggccacaaggtgaaacctgtgctgctggggccgattacctacctgtggctgggtaaagtgaaaggtgaacagtttgatcgcctgagcctgctgaacgacattctgccggtttatcagcaagtgctggcagaactggcgaaacgcggcatcgagtgggtacagattgatgaacccgcgttggtactggaactgccgcaggcgtggctggacgcatacaaacccgcttacgacgcgctccagggacaggtgaaactgctgctgaccacctattttgaaggcgtaacgccaaacctcgacacgattactgcgctgcctgttcagggtctgcatgtcgatctcgtacatggtaaagatgacgttgctgaactgcacaagcgtctgccttctgactggctgctgtctgcgggtcttatcaatggtcgtaacgtctggcgcgccgatcttaccgagaaatatgcgcaaattaaggacattgtcggcaaacgcgatttgtgggtggcatcttcctgctcgttgctgcacagccccatcgacttgagcgtggaaacgcgtcttgatgcagaagtgaaaagctggtttgccttcgccctgcaaaaatgtcatgaactggcattgctgcgcgatgcgttgaacagtggtgatacggcagctctggcagagtggagcgctccgattcaggcgcgtcgtcactctactcgtgtacataatccggcagtagaaaagcgtctggcggcgatcaccgcccaggacagtcagcgtgcgaatgtctatgaagtgcgtgctgaagctcagcgtgcgcgttttaaactgcccgcgtggccgaccaccacgattggttccttcccgcaaaccacggagattcgtaccctgcgtctggattttaaaaagggtaatctcgacgccaataactaccgcacgggcattgcggaacatatcaagcaggccattgttgagcaggaacgtttgggactggatgtgctggtacatggcgaggccgagcgtaatgacatggtggaatactttggcgagcatctggatggctttgtctttacgcaaaacggttgggtacagagctacggttcccgctgcgtgaagccaccgattgttattggtgacgttagccgcccggcaccgattaccgtggagtgggcaaaatatgcgcaatccctgactgataaaccggtgaaagggatgttgaccggcccggtgactattctctgctggtcgttcccgcgtgaagatgtcagccgtgaaaccatcgccaaacaaattgcgctggcgctgcgtgatgaagtcgcggacctggaagccgctggaattggcatcattcagattgacgaaccggcattgcgcgaaggtttaccactgcgtcgcagcgactgggatgcctatctccagtggggcgtggaggctttccgtatcaacgccgccgtggcgaaagatgacacacaaatccacactcacatgtgttactgcgagttcaacgacatcatggattcgattgcggcgctggacgcagacgtcatcaccatcgaaacctcgcgttccgacatggagttgctggagtcgtttgaagagtttgattatccaaatgaaatcggtcctggcgtctatgacattcactcgccaaacgtaccgagcgtggaatggattgaagccttgctgaagaaagcggcaaaacgcattccggcagagcgtctgtgggtcaacccggactgtggcctgaaaacgcgcggctggccagaaacccgcgcggcactggcgaacatggtgcaggcggcgcagaatttgcgtcggggatgatgagtattaacgagtcattgtaaattgcagtacgataatggcttccagtactggaagccattttgcatgagtgccagattgaagcagatcttcaggagtagaaataaccgaatcgtttttttcgcaaaacacagttttgagtgattccgttcagtaatcaacgctacgttatttattctcacgttgcacgagattgtatcccttttcactaacgtggtagtgaggcatagacttatgcccgctatcctcaataataaccaaaccttcgttagctaatttgttaacaatattaacaacattaccgaatcctggtatttgccttatggatagtgtgcgatcgagattcatccagttccagtttatatctttctcagtcataacgttcagcacgttaagttcatttttagtgatcacgatattctgtaccaaaattgatgagtatcttattgaaagatcacaatgtaaatcatgctcctgtaatggctggatcagaagaggttgtcttgttgttctttgataagattcaatccatattgagaaactctgtagcgtggtttagagttgccctcaccatttacgatatcaaccaacccatgattaaccagctttgttacgatattcgctacgttgccaaatcctggaatatttcgtatagctaaagtacgatccagcaccatccagctccagtcaatatctttctcagccataactttcagcacgttaaattcaactatcgtaatcgtcatttttttgcatccggatgaaataagtcagtatctttaattttaaagtcttctagagttgcagtatgtgcattattccataattcatatccatctaaaccattcggttcacctgtttcccatcctaaattacaataacgctgatactcgcggcattcatgagtatagtagttcagatcgtatttttcaggaagcaattctttatttgctattttttttagccttgaaatcattacatcattagctggatcatgatcaaatctggagatatgcttttcaacaatagcgataccttccctattgattgttacgccatctatcgtcaggttttctattggaccaccggcaaggtcgggattaaatggtcttcctgatactgctcctctggctccgaaatgctcaaatgattccaaatcagggaatctcattcttcccagaacaactccagcaactattgaagcaccagcgatgagtaaccctttgttatccataacttgatcgtaaccagcaggtgcatctcctcccaacttgtttgctgtttccctgaatccttcgatattcccattgtatatgccgccagcagcaagcagtctgccaaccgctttactattgagtgttttgaggccattattatctttagttttttgccgtggtataaacagacggttgtagttatcgggaaatgccaaatgactaaattcagtattagcaatcagatgcctggagagtatatattcataactgacagtgatggtttctgtatccagattgttctcagtaaacaggtgattgattgctgataagagcgcgccgcggagttgaatgttgtaatatttctcctatcgaccaaatctattgatccgatagaagtcaaactccatgaacaactgctcgttattgttaatagcgttaataagtaacggggagcttttgtcaatcaacttacagaaactaaggccatgtaattgtgaccctttgcctgtattcgtaatactattagatagcgagaacgcgaagatttcatcttcatggccaatctgccagcgattacctattgatgcgctcgttccgcaacgagaggaaatacatccttgttgttctccggttatggtcaggtaaatttcatcactcatctttgatgaactctctttattgcttgatgttttaaaaataaacaatattgctatttgtttataattatttactcctcaagttaatggatttaaatatgggaaataaaatgtttcactttagaccagttttcatgaggaaaatctgtaatcattaataataaacatgaatattttgcagtgattaatatttgttatgaatataatctataacaatgaagagttatcagttgttcggtgtatagccagagacgagttcagtttgtgatttttacagggcagttacagccgcaaaattttatggctgatttcaccttcccctcaagcttatctttcttaaaaagagaaataattcttaaattcaaatagttatatacaatctactctctttcttgtgactagcttcacatttcatactgatgcattggaatgaaataaaatttcatgagattttgtgttttagaaaaattatttcatgaggtgtgaaatggacgcaaagctgtacatcactgagatcatcaatgaattaaccttcgttaaggactctatccgtgaggatgactgcaccaaattgatcgacgctattcagcaaagccagcgcgttttctgctatggcctggggcgtgccggcttttccatgaaagccttcaccatgcgcctgatgcatatgggcaaagaggtttacttcctgacggaaaccattacgccgaactttgggcctggcgatctgtttatcgtttcttccgcttccggtgagacagcacaactggtggcactggcgaaaaaagcacgtcagtttggcggcgctgtggcggtgttaaccacgaatcgacacgccactatcaccgagtttgtcgacgtcatcgtgcaaatcaatgccccttccaaaaatcaaaaagattctgttttccgctcggcacagccgatggcgtcgttgtatgagcaagctttgctggtgattgccgatgcattagtgatgaagatggctgctgaaagcggtgcgccggaaagtgaactgtttaagcgccacgccaatctggaatagtcgtcgccgttatttgctcgataccctacaggagaataaaaatgagcaaaaaaataacatccttgtttaacttcaagaagttgcagaaattttcttctgctctgatgttaccaatcgccattcttccggcggcgggtttgattttagccatcgggatttcatttaacattgagctgctggcgaattgcggcggcctgattttcgccaaccttcctttgctgttttgtgtcggtattgtgattggcctgacaggtgatggttcttcatcactttcagcgattatcagttacatgatcatgaatgccacgatgggaacgcaacttggcattaccgcggagtccgttgcagccagtaacggtgactatgcgatgatcctcggggtaccgacgttacaaacgggagtgtttggcggtttgattgtcgccatctttgtttatctgctctatacccgcttccacaatattgaattgcctcagtttcttggtttcttcggtggaaaacgctttgtaccgattattacggcggtggcggcaattattgtcggctatttattgccgtggctgtggataccggtacaaaaaggtctggcgtcgctttcaacgctggtgaccagtgggcataacgcgaacttcgcggcctttatttacgccgttggcgaacgttcgctgattccttttggcctgcatcatatctggaacgtgccgttttattacaactttggcgactacatgaccaaatccgggcaactggtgacgggcgatattccggtgttctttgcccaattgcgcgacggtgttccgttgacggcggggttgtttatgacaggtcgtttcccgatcatgatgtttgcgttacctgccgccgcgttggcgatgtatcaggaagcaaaaccggaacgtaaggcgctgattaaaggccttttactctccggtgcgctgaccacatttgttaccgggattacggagccgctggaatatgcatttttgtttgcagctccggttctctacatcattcacatcttcttatatgccacttcatttgtgctgatgaacatcctgaatgtgcacattggtcatccttttgctggcggtcttattgatttcgtactgaatggcgttatgccaaaccgcacgccgtggtatctggtgttcctggcaggcgcgggctatgcagcgatttactacaccgtatttcgggtactgatccgcaagttgaatctgaaaacaccggggcgtgaggatgaagagattgccgttgcaaccacattaacgcgcgaagaacgtccataccaaatcatcgaagcagtaggtggtttcgacaatatcgaagatgtggatgcctgcgcaacacgcctgcggctggcgctggtagacgataagaaagtgaatgaaaaacggctgaaggagttgggggctgcgggtttagtgaaactgggtgatggcggtgtacaggtgatatttggcggcaaatcgcaaatcctgcgcgacgaaatcaaaaccgtaatgagcagaccgcgcccgacagaaatgacagtggcctgtgctaactaattcgagattagcgggctggtttcagcccgccagacagagagagctgaagtatgaattcacaattactggctaacgccatccggatgttaagtgttgatgcgatccagaaagcgaactccggtcatccgggcgcgccgatggggatggcggatattgccgaagtggtctggcgtcgtcacctgcgtcataacccaaaaaatccgcagtggtttaaccgcgaccgctatgttcagtcgaacgggcacggttccatgttgatttacgctttgctgcatcttacaggctacgacctgtcgatggatgatattcgcgactttcgtcagctccactcccgcacgccaggtcatccagaatatggttatacgccgggtgttgaaaccaccaccggcccgttggggcagggcgtagctaatgcggtggggatggcgattgcggagaaggcgctggcggcagaatttaacaaaccgggctttaatattgttgatcatcacacatggctatttttgggtgatggctgcctgatggaagggatctcccacgaggcctgtggtcttgcaggaacgctgaagctcggcaatctgattgctatctgggacgataacggtatttcgatcgatggtcacgtagaaggctggtttgctgaagatacggctgcccgttttcgtgcctacggctggcatgtcattgaaggcgttgatggtcacgatccagaagaggtagatgctgcggtgcgtgaagcgaaaagcgtcacggataagcccagtctgctgtgctgcaaaacgattatcggttttggttcgccaaataaagccaacagccacgattgccacggctcggcgctgggtgcagatgaagtggcgctggtgcgtgaacgtctgcaatggccgtatgcccctttcgaaattcctggtgaaatttatgccgcatgggatgcgaccgagaaaggcgcgcaggttcaacaggaatgggatgcactgtttgccgactacgcgaagcagtggccggaactggcggcggagtttactcgtcgcatgaagggtgatttgcctgctggctgggtcgagaatatgcagaaatatgtgcacgatctgcaatcccatccggcggcgctggcaacccgtcaggttagccagaaatgcctcaatcacttcgcagatatgctgccggaactgatgggcggctcggcggacttgtcgccctctaacctgactcgccatcagaaatcggttgatttcaccggagaaaatccggcggggaattacatctcctatggcgtgcgtgaatttggtatgtcggccatcatgaacggtcttgcgctgcatggtgggtttatcccttacggcggtactttcctgatgtttatggaatatgcgcgtaatgcactgcgtatggcggcgctgatgaagatccgctcggtgtttgtttatacccacgataccatcggcctgggcgaagacggcccgacacatcagcccgttgagcaactggcgtcgctgcgtctgacgccgaatatggaaacctggcgcggttgcgatcaggtggaagtggcggtggcctggcaacaggcgattgagcgcaaagatggcccaacgtcgttggtattaacgcgccaacctctggcgcaacagccgcgcaccgctgcacagttggcagagattgcgcgtggtggttatgtactgagtgattgtgacggtcagcctgagatgatcctcatttctgcgggttcagagattgagttagtggtcagcgccgcaaaagcgttaacggaagaagggcgtaaagttcgcgtggtttccctgccgtgtaccgagcgtttcgataatcaggatgcggcgtacaaagagtcggtattgccaaaagctgtacgcaaacgtctggcggtagaagccagcatcgccggattctgggaacgctacgtgggcctgaacggtaaagtgatcggcatgacgagctttggtgagtctgctccggcgaatgtgttgttcaaacactttggttttacgccggaaaatgtcctggcgcaggcgcgtgagctactgaacagctaaacctgcacaaggggtgaaaggatgaccttttaccccttgaaacgggagccaagaaactcttcacgggtgcggtatttctcgtaatgcgccttgtttttatacataaacaacagcaccagcatatcaataacgcccattgccggaacgcgagtggagtcgaaggcttcaaagaagattttatcgctgaccgcggtattgagttgatgggtggagagttttgataacggagatttaatatagttagtgatacaaacggatttggcaccgcgctctttcaccactttaaagatatcgaccattaagttggtgctgccagagttagaaataccaatcgccaggtcgcgtttccccatagaatatgccgcattaatttgcatttccgggctgacgtgaacaacggtttttaatccgagttggctgaatttataagcaccataaacggccagagggtttgaatttccagcagcaaaaaagaaaatagtatcgcaattagcaagtagtttgagaatggactcaagcacttcggcattaaaaaattgcgttgattgtattaaatcttcggcctgtttttttaataagaaggttgccaaagatgttatatcgctgaagtcggtattttcaggatagctattgtcaggattaatgacttcttttgctaatgcaatttttaaatggtaataaccctgataacctaatttcttacaggtgcgtacgatagtcgcttcactggcatggcttttttctgatagttcagtgacactatagttcacgacttcatgtgcgtggctaagaatatagtcagcgacctttttttccgcctgatgcagtgtagggtaattgctttgaatcagactttttacggttatgttattcataattagtaaatttcattctgacagaaagtgctgattataacatagttttcaggcgtggataggtgtgaaaaaaatgaaggtgtgcagtgaacgtaatgattaacagaccggttaattttcatgaattacgtcaactgcacaaaaataatttaaacgggtgctctaattaaagcaagacttatatttttatcattgtattgtcaattaaatacaaattgtgtcattaattgtgggtttcttaaatattctatgcaccactgacaggctttgcccataccatcggaacgagcggcaagaaataacttggtggcgtgtttatgttcgcgcattggctttttaagcaatttaccgctgttcaataacggcaatgccagatgatgtggaatataaccaataccgacgttttgttctattaaggcgattgccgtagcgaagtcaggaacaaaaatgggtttttgtccttccaacaaccaggcttgcatcggggggaagttaacggaggtatcgcggatacaaaccgctggatagtgacgcaattcactgttttctaatggatgccgcttcgctgccagtgggtggagtgggctgacgacaaaatcccattccatttgtccgaccggttcgctaatgatgccttcactgcttggtactgcatgaggagcaccgtagaccagatcagcacgcttactgtacagcgcatcccagcagccgttgtatacctcaagatctaccgtcagtgttgttgatgtgaattgccgttcaaaatctcgaataaatgccaccagcaaatcaccaggaataatattgtttaccgcaattgtcagttcacgctcaataccatcgtgaatcagcactgtgttgcgctttaatgcttccaggtcgccaagaatagttttgctatgttcgatgaagtaacttcccgctggcgataattcaatatagcgtcccttacgaatgaacagttcaacgcccaggctctcttccgctttcttgatagtgtaactgatggcggaagggactttatttaactgctcggctgcggtggtaatgctctggtgtctggcgaccagatgaataacacgaagcgtttcgtctgagatgaacataaggctccctggtcagtggtaaagtggctgaatctctccagattcagccgtaatcattgcctgagtatacccaggaattagcggtgttgacttgcccgactgagaatcgcatacgcgatacatgccaccagaatcgagtctaccgaagggatcgtcgtcagggtgaataagccttttacggtcataaagccaaccgctgcgcctatgatccatgctgcgaatgtcagcactttaatctgtgactcctgggctaacactgactcttgatagccattacggcgataaaggaaaaagtcagcgatataaattccggcaacgggtggcgtggcgatacccaggaacagcagaaacggaataaaccacgccataatatccatactgcctacgatggcggaaaggatacccagcgccacggtaatctgccatttgggaaagcgggtaagcagtgtggaaaccaccagcgtgccctggaacatattgcccgcgttaccggtgacgcaggcgaaaatcaacaacagcgccgcaggcagaaccgcaccgaataccgccatcgcacccagtaaagatccctgaccactaatggcgctcggcgttgcacccgcccagtagagcagagggtaggcaaccagaaacgtcacgcctgcggcaatcagcgcatgtttgcggttatgcacaaaactaccgaaatcaggcagtgtggcaaccagcacaataatggtgccaacaacggtggaaacggcgacacctgtattcatctccacaatcgccgctggtactgccacttcggtatgggttgccacatagaggatgtaacacagcaccagcgcgataaccggcacggcaacttgggcaatttttcccagaacggtaaagccaaatgccgtagaggcgacaaaaatgacacagccagccgccactaacagtgccagtggaacttccagtccatgttgagccagtaagtcatgtaccgaatgaccaaacatattggcggtaacggcaatccagccgaacagacttatcgccatcaaaatgttaatggcgatggcccctttttcgccaaacgaatatttcacaatgccatacgttggcaggcgggctttttctcccacgctaatggtgatggctgaaagtaaggtcagaatgacgccgcctaacaatacgacgctaattaaactgctgctggaaagttgattgccgaggcttgaggatgacaacagtacaggtgtgacggcaatacccagcaaaatcatggcaatacgcaatcctgatgccgtattcagattctcttcttttttacgcatagtatgttccctttataaatgcgcgttacacagtatgaaaatgcccggtgtatttgcgccagctacccagttctgtaatttcccgttggccttcggtcagccagttttctgccagtacgcccagcacttcgctaccatcggcaagtttgattttgccaattgccagcccagcgggttcgctcattaacagagcggcaaaactggccagcggtaattgccaaatttctacgtcgacgtgtgttcctccttcattcacgcgaatcattcccggatggcgatcattaatactccacaaccggtaatgggcgtcagttcggtcttcacggacaaaaataccgcccgctttttgcatatttgggttgagttccaggccgcgcatcagcgttccgttaacggctaaaagcgttgtagtcattgtgttctccagagaattaaagggttatccatgtaccgctctgatgcgccagggctgcttttatggtttgcggtgaagtaatcaggccgctggcctgtttgccttgttgctggctggcattgatgaaatcaacaatggcttccactttgggttgcatactgccgacaccaaactgaccttcccgcaacagcgtttgcgcttcggcaacgctgatagcgtcgagccactgttgttgtggtgtaccaaagttaatcgctactttttctacaccggtggggatcaccagcagatctgcgcctaactgactggcgagcagcgcggaggccagatctttatcgatcacggcttccacacctttcagttgttgcccgtctcgcaccaccggaataccgccgccgccgcaggcaataaccagatatccctggcgcaccaggtgagcgatggtgtcgtgctcaataatttccagtggtgcaggagagggaactgtacgccgccaaccacgcccggcgtcctccatcagcgtccagccgagttgttgttggcgttgttgggccgttgcttcatcgagaaacgcgccaattggtttactggggctggcgaaagcatcgtcatgtgggctgactcgcgtttgtgtcaccagggcaattaccggtttgtttatgccacggcgagccaattcgttatgcagcgctttctggaacatgtagccaattgcaccttgtgtatcacccacggcgtaatcaagtggaaccggagaaacttcgttactggcgagttcagagcggcgcagaataaagcccacctgcgggccattaccgtgggttagtaccaggtcccatccggcttcaaccatatcaacgatatgctgcacgctttccatcactgcaacatattgatcgggaatactattgcgttgctcgtcctgaatgagcgcattgccgccaaccgcgacgacagccagtggcttaaccatgatggttctcctttgcgacgatctccgccagtgcacgtacagcggcgacaaaacaggccatcggcgcagtggtgatcccggcaccaatttgcccgacccccgcttgtttgtgggcgatacccgtattgatgaccggtaaaatgccgcgatcggtcactttacgcgcatcaatccctgctgcggtgggggcaaaattgagggctggaagtgtaaatgcggggttaccgccgagggtgatggcttgcatccgacggctgttattggtggcatcgacaggggtgcctcccacaaatttgacgatcgccggagacgacgccatcgcgaagccacccacacctgcggtttcagtaattgcgctatcacccaggtcagcagcagcatcgtcaacgccaaatccggggaagaacagaccttcaacggcattggcaggagcctggaaccagcgatcgccagtaccggaaagccgaataccaaaattcaccccgttacgcgccatcaccgtaaccattgaactgaacggtacattggcggcggcatccatcattgctttacaggcagccatcgacagattgaggaagaagtgatcgttaccggtgataaatgccacgacgcgctggatatgttcctgtggaagagagcaggctagcaatgccgggagcaggcgcttaatcagcaaaccggtagcggcagcattgcggttatgaacttcatcccccatatgcagcgcctgcgccattaatggcttgagttccagctcgccgtgttgtgcgattgctgctttcattgctggagccagttcatcgcgcatccaggccagacgattgagaacttcatcgttattggcgccaaaacggagaaccttacccagaccttcattgaaattgctaaaagtacggtggccgttggttttgttttctaccacccataacggcatcgacgggctgatgatgcctgccattgggccaaccgcgtgataatgatgacaaggggcaaggtcgatttcgcctgcgtttatttggttttcagcgtcttgctggctggtggcccaaccttcgtacagcatggcaccaataatcgccccttttaccggaccacacatctcttcccaggcaatcggcgggccagagtgcaaaatacgtttttgttcagccattgctggaatggcctctttagcgagcatgacatccaccagcacgggctgtgcttcgagataacgtgccatggcgatttggttggcattttctaccaggggatgacatagcaacgatgccagatccaatccagcgtcaatatcgccttgtgctggtggctgccagttgagtgcaattgcgcttcccccggcatgttgaatattgtcagcaaaactgtgtagtcccgcgttcacgaccttcaaaggctgattaaataaggtattcatacgtttagcccctttttctgcaactgagtctgtgcaacggtgctggcccatagcgccgcctgtgcattgctgctggcgatgatgacgcccgcattttgtagtgcgcttatctgctgactgcgtatttgcggatcagcttccgttccgcaaacgtgcgcaatcagcaacggtgcgttattcatgtcgatgtgtgaaagttggtccagtaattcgctggcaggcgtcgtggaagcgccataaccaagtaccaggtcgaataacacgacggcagtgtgtgagtcgttgagttcgttgagcagacgttgattgcgcagagtcgggtcgatcattggatgcggtttgccacgggtgaaatcatcgtcgcccatatcgatcaacgtgtgatcttcgctttgccagatatttgccagagcacgattacccgcaactggcgtattggaagctgcgctgaatcccttttgttggcagataagttgcgcttcgtagcagaaggttcctccggcgaaaacaccgcgtatcgcctggcgatgggctggcagacgctggcaggcgttttgtaacattgtgagatcgtcgcaggaaatctcggtctcgacagccggaagtggttgatcattcagtaacgccacggcgatgttggcggcgctggcaagtgtggtggccgcggtgatattgggacgtgccagatcatgcggattcgcaccgaggaaattcaccactacgggttttccacaagcctcggcacgctccagaatagtccgggcaacgatcggtgaaggcggttttgatataagcacaatcacgcgagtttcatcgtcttgcgccagcgcatctaaagcgaagagcatcgatattccaccaatctcttcactgagatcatgtccgcctgttcccaacgcctgagaaatacccgctccgagctggtcgattcggcaagtcacttcctgtagcccggtgcctgacgcgccaataacaccaattgctccgcgtttcaccacattagcgaagcctaacggaatgccgttaacaatggcggttccacagtcaggtcccattacgatgcgctgacgttctcgggcaagcgttttgatggatttttcctgcccgatactgacgttatcgctgaacatcatcacgttcattccgaggtttaacgctttcattgcttcggcggcggcgtagtctcccggtacagaaatgagtgccaggttggcttcgggttcggcttccagtgccatttccaggctgaccttttccggtgttttaatgccactatccgtttcatcatcgggtttgctggtcagacgttgctgggccagtaccagtgcttcattgcaaatatcttcttcacccatgactgcaatcactaaatcattgggactggcgttgatttcgttacccagacccgcatcgcgcaattgttcgagattattgggcgttcccatgacgaccgaggcctgttgaataccgggcaacttgctgatttgcgcggaaatctgcatcagagaaactgagtcctgataaagattactgaaaactttatatttaactttcatgctgttacgcctgtttcattccgcccgatagcaaaattcgggcaaagcatccccgtgtagccccataaacgggctacgggagaaaaggttgaaatcaattcatggtgttcagggttcgaaagccatgcagcattcctgcaaggcaatctactcctgacgttgcgccaaattgcatgacctgttctgcacaggatgcgattgtcattgccgatgcgctcccaaccagttgtgcgagtaactggcaaatcggttctgaaaaatgtccctgaagcgcacgctccagataatgacgactgatatccgtggtgttgtgcgcatgttgatcaattgcctgctgcaaccggtattgatgatcggcaagtggtgcagggagttgccataaccagagcgctgccagatagcccaacaaatagtcatctccatcgggtgttaagcctttaccaaagccgatcagttgtggcacctggcgttccagcgcatctggatgttccataatcgctaatccctggtgcgtgaggctatccggcaggtgcaatgtgctttgaacgttatgttccagacaaaataaaagccgttgcgatgccatcgttgggtagtgctggaaaaccaaagggaatgcctcaagtgtcagcattctccccacaaatggcgactgccagagcgttgcgttttcgagcgccacacaaaatcgaggtgtccgcagtaagccttgggttaactgaatgggatctgaatgggcaatctctcttcgccagtcccaacattcaggtagccagactctggcagcatcagggagattcagatacgtttgcgcacacaacagagtgatgaatgttcccgcgtctgaatacagatttaccgcatgtttaaaagcgctatgcagacgtaaatcttgcgtttcattctgcgggaaaagatatcccaacgacgatgcgcaaagcgtaacctgtaccatcggcgttagccttccagacctgcaataatggctttggaatcagtaacccaaccgaaaatggcaccttgtgctttgatcatctcaagggcgtatttctggaattccgggaaataggagccgacacaatcttccgggataatgcattcatagccacgatcatttgcttcgcgcacggtggtggttacgcaaacttcggttgtaacaccacaaactatcagcgtcttgataccgtggttttgcaaaatcagatgtaagtcggtttgataaaacgcgcctttgccaggcttatcaatcaccggttcgcctgccaccgggtacagttcaggaatgatgtcatgacctgcttcacctctgaccagaatgcgtcccatcggtcctggttcaccaataaaggtttttccgccgcgcgtcagtttggctggcgggcagtcgcttaagtctgcacgatggccttcacgagtatgaataaccataattcctttttgacgtgcggctgccagcacctctgtacatggtgcgatagccgtgcgtaccagtgaaacatcattgcccagtgcctcaccgaagccccctgcttcgacaaagtcacgctgcatgtcgatcatgaccagtgcagttgtgcgcggatcaaaaggtaattcaaagggttgagcctgaaaaatggattgcgtcatggtaaatctcctgtctgatgtttaaacgatccagttgttctgagaacgagtattcaggagaaaagcggcacaaaacaggaaaaaagtttgccgcacagcaacgaaatttttgcattcagcaggtggtgtgatgacgaatgtgaagggagtcaaagagtggcatacagcaacaaattttttgatgctgtatggttttgagattaaaaaaatcgttgaaattgtgtgagcttaatcatcagatttagcgactatggcgttactttttaacaccatactgtgtaaaccattccaacattcgctgccagccgtctttcgcagattcggcatgatagctcgggcgataatcggcgttgaacgcatgccctgcatccgggtacacgataatctctgctttcgcgtttgctgcccgcagcgcctggcgcatcgtttccacgctctcttgcggaatgctgttatcctggccgccatataagccgagaaccggcgcgttaagatcggttgcgatatcaacaggttgtttcggtgaattcagcgacttatcgcccgtcagtttgccgtaccacgccactgcggcttttagctgtggattatgcgcggcatacagccaggtgatacgtccaccccagcagaatccggtgatcattaaacgatgaacatcgccgccgttgcgggaagcccaactggcgacatgatcgagatcggccagcacctgcgagtcaggcacttttgctaccagaccgctaagcaacgtggggatatcggcaaaatcattcggatcgccttcgcggaagtaaagttcaggtgcgatagccagatacccctccagcgccagacggcgacaaatgtcgcggatatgttcatgcacgccaaaaatttcctgcactacaatgaccactggcagtgggccatcgctttgctttggtctggcatggtaagcaggcatgttatccccttgtgaagggatagaggtgaagcccgccacaatcgcgtcgtccggagtctgaacgatggtcgaagcgagaggcgatgcagcaggtgcaaatccagattgttgtgttgttgccatggtattctccgtacccttataaaaatgttgcgcaatgttaactatagtcagcatgcaacaaatcacattgcctgaatcggctcatcttttatgcagtcctgcagaatgaagagtgatttatgtgatttgcatcacttttggtgggtaaatttatgcaacgcattttcgtcatggtgatgagtatcacgaaaaaatgttaaacccttcggtaaagtgtctttttgcttcttctgactaaaccgattcacagaggagttgtatatgtccaagtctgatgtttttcatctcggcctcactaaaaacgatttacaaggggctacgcttgccatcgtccctggcgacccggatcgtgtggaaaagatcgccgcgctgatggataagccggttaagctggcatctcaccgcgaattcaccacctggcgtgcagagctggatggtaaacctgttatcgtctgctctaccggtatcggcggcccgtctacctctattgctgttgaagagctggcacagctgggcattcgcaccttcctgcgtatcggtacaacgggcgctattcagccgcatattaatgtgggtgatgtcctggttaccacggcgtctgttcgtctggatggcgcgagcctgcacttcgcaccgctggaattcccggctgtcgctgatttcgaatgtacgactgcgctggttgaagctgcgaaatccattggcgcgacggctcacgttggcgtgacagcttcttctgataccttctacccaggtcaggaacgttacgatacttactctggtcgcgtagttcgtcactttaaaggttctatggaagagtggcaggcgatgggcgtaatgaactatgaaatggaatctgcaaccctgctgaccatgtgtgcaagtcagggcctgcgtgccggtatggtagcgggggttatcgttaaccgcacccagcaagagatcccgaatgctgagacgatgaaacaaaccgaaagccatgcggtgaaaatcgtggtggaagcggcgcgtcgtctgctgaaataaaaaaacgctccccaacttcggggagcgatatcagttattgacgccgtaaacgcattattttgcggattattggcgtcagtagcgtaaaggctgccagagtcagcaatgccagagtgatcggtcgggtatacagaaagtcgagtgaaccccctgaaagcgacagcgcacggcgaaaattactttccgccattggccccataatcaatgccaggaccactggcgacgccggatatccccctttctgcatgaaatagcccactacgcccgcaatcaacataatgccgacatcaaacaggctgttgttcagtgcataagtcccgaccacacaaagtgcgaggatcatcggtgtgagaatattgccgggaattttcaccacattaccgatgactttcaaagagagcagtccaagaactagtagcatgaagtaacagaagatcatgccgacaaacagcgtataaaccatatcaccgtggtcggtaaacatcagcgggcctggttgcattccctgtaacgttaacgcgcccagcatgatggcggttaccgcatcgccagggatccccagcgtcagcataggtaacaatgcgccaccggtgcagccattcgcgcctgcctcacaggaggccacagctttaatttcacccttaccaaagttttctggtgtcttactgaaacgacgagtttcgttataggcaacaaaagctgcaatatccgcccccgcaccggggatcatgccgataaaaacccctaatcctgatgagcgcaaaatggttaatgcgatgcggcgtagtgtttgccagggcagtaacagactgccgatagccaccttcgcgccccgacgaatttgctggttttgctccatagagcggaatgcttctgaagcagcaaataaaccaatcatcaccgggataaatggcacattcatcagctccacaaatccacctgtaaaccgtggaaaaccgcccattggatcaaggcctatcgttgcgatcagcaatccgccaaccccggcaatcagccccttaatcagcgactcaccggaaatactggcaataatgctcagtccgaaggttgccagggcgaaggactccgaggcactaaatttcagcgcccaactggcaagtaccggagagagaaacatcagcacgataatgctgagcgttccgccactaaaggaagagaacgtggcggcactcaatgccagccctgcttttccctgtttcgtcagctcataaccatcaatagcggtggctgcggcggcaggcgttccgggaattttgagcaaaattgcggtgatagaaccaccgtagacgccaccaaaaaagacgccgcaaatcatcaacaatccagaaacaggctccatgccgtaggtgaaaggcagcaaaatcgccacacccatggtcgctgtcagaccaggcaaagcgccaatcacaatacccagcatcaccccaaaagtggcaaacagcagcgcctgaggattattgagtaatgtcgaaaaaccctgagttaaaagttcactttcaaacattgctggcccctgttattcgaaaaatgtgccgacaggcaatggcacctgtaacgcttcgacaaacagcaaccagaggattgccgttaacagcagcgcaatacccggtgtgagtacccatcgcctgtagcccatcaacgtcataatgacgatgaggaaaacaggagtagtaatgagataaccgcagtagctcatcgccacaatataaaacgcggttgccgcaattcctgttgctgttttcctgaatgccggtttttcctgtgcgttggcgcaagaggctggttttgcctgcaaaagatcgcgtatcaccagcaagacagcgagcacaatcagggcacaggcatagaaggtagggaaggcacttgcaccgggatccgtttcaatggcagttgctggaaaatcagcggcattaatcatcaccgcgccagcaaccacacaaagtaacagcgccaccaccatcgttgatgaaaggcgcttgcggtgcggtacggcgagttgagcaacagactgttttgtgttcatcaaccgtacctcaggtttattttttcaggcccaggcgagtcagcaactcgtcaaagtacttttcctgttcgctgatttgggtctggaagctggcagcgtcaagccatgcatagttgagattcaacttttgcagtgcatcctggaatgcaggctcttcagccgtctcttttgctgcctttgccagaacatccaccacatcctgcggcgttttttgcgacacaatcaggccgcgccaggtgccgatggagagatcaacgcctttctcttttaacgtcgggacgtcaggcatggttttcattcgctcatccgccatcactaccagtgtcttcagcttgccgccattcacatggttgataacttctcctgggcttacggaaaccgcttcaatatgcccgcctaacaggcctgtaatggcaggggctgcgccgtcatacgggacatgagaaaactttgtgcccgttttgtcttccagtgcagctgccgccagatgccagatagctccggtgcctgagttaccaatgcgtacttttccgggattcgctttggagtaagccataaattcttcatagctattccacggcgcatcggcacggactgtgatagcagccggatccgcattcagacgggcaatgggtttaaagtcgctggttttaaaacgcaccattccgaggctgggaagggtggtcagttcaaccgtgcctaaaccaattttgtaaccgttagggcgggcagcggcgatttcactcaggccgatagcaccgcctccgccaggtttattgataaccccgatgctgacgggtaaatggtttttggcggcatcagcaaaggcacgggcaaccagatccgtaccgcctccggcagcgtagggaacgactaactcgatctgtttggttgggtaggaggctgcctgtacaggcgcaatgctgagggcagcgcctgcaagaagtaccattgcagccatttttttcggtaaggtaagatgttttatcattgcttttatatccttatttatcagttagttgctatttaaattgttccatgcgttcataaacagtactgcattttcatagacttgctctggcgtcatgccggggcgatatagcgcagaaccgaggccaaagccgtttgcgccgtggctcagataacgcgccatggtttccggtgtgataccgccaaccggtaacatcggaacggattgtggaataaccgcacgccaggctttggtaacttctggcgtaatttgttcagccgggaacagcttgatggcattagcaccatgttcaatggcagcaaaggcttcggtgggcgtggcgacgccaggcgcacaatacatacccagcgcacgggcgcgacggatcaccgcagtatcgcaatgcggcatcacgataatctggcccccagcctctttaaccgcaaccacctgctctaccgaaagcacagttccggctccgaccaggcagtccttaggcagggcgtcgcgcagtatactgatactttgcaacgcctccggcgagttcataggaatctcaatcaggcggaatccggcggcgtacagtttttcaccgatggcgacaatctcatccggtttcacgccgcgtaaaatggcgactaacccggttttttgcaaaagcgtattaaatggcatgggtacattccctggcgttggtggacagtaacccggcagcgtgggcgattcgccataatccctgttcagtggcattaggaatggcgtgtatctgtctgccgggaaaaacgtggctgaatgcttgtgaatagcggctgttcagatttgcgctaccgattaaggcgatcggtgttgtggcgggtaaatcacgtagcaaactggatgccagaccacataattcatggcctatcagtaatccggaaaggtaatccccctgcgaggacgacgtaagattactggtcagcaggcgcgaacgggtcgaaaacagcgtcgataataatccggtctgatgatgctcttgtgctgctgtcagcccgtgggtgaaggcatcccagtgcggttcatctccaggatgcatggtggcaccgagaatcgaatggcgggataaaacatcaaataactcgcccgtcataaaggttcggaaatcggtaatggtgttgttttcaactactgcccatttcgcatgtgtgccgggtaagcctatcagcactggcataccctgatggatcgcgttttgcagggccggttccatcgagatagcaccgaagatttgtgtttcttcgccacgcatcacttcgggcatttcaccttctttaatcacgccaggaatgatatgcagcattgtctgctgctggtggataacaggcgtcaactgcttcgccagaccctcgagagtgaccgggcaaggtaaataagctgctgattgccacccttgcgcactgccgagcatgccgcaagccagtaccgggcatggggtttgtgccagccagtcgccgcagacacgtaaaaacgtatcgtggaaagcgtcctcacgtgttgctgcctgggagggtaatttcatgatcccccaggggaattcacgtttttcttgtggatttggtgattcgccaaaacgccatgcccgaagcgatgacgttccccagtccagggcaataaatgagggtgctcccggcattagtcgtttcctttaatcatggtttatttatctttgcggacgtgcttaccccagcccagttcagcggatatctcttctgcacaggatttgacgtaaggtgccagttcttccagacgcgccagcgacatatacgtggtggtactggcgacagaaatagccgccacaatttcatcccgggcgttgtaaaccggcgctgcaacgcaacggatagtcggctcgttctcttccagatcaaaagcaaaaccactggcggcataacgacgcatgttctgaataaatgtgcccagttttgtttcatcaccacaggtcttaaacagcgtgcgccactcttcttctgttcggttgaggatcaatgccttgccgatgccggtgattgccagtggcatgcgatggcctgggcgtgagcgcatttccagcccgcgctgactgttgatcttctccagatacagcacttcgtcgccttcaacgatccccagatgcacggtgtccagggtgtaacgggcaaggcgttgcaaaacgggctgggcaatttcgtacagcgaggtgctttccagtgctctggcaccaaattcgatcagtttggcacccagttggtagccctgcgttgggacatggcgcagatagcgttgttccaccagaacggtgactaaacgatgggttgtgctccgggtcgtgccggtgaactcgccgatactttttaggtcatggcagccgttataaacagcattaagaaccgccagtccacgtaataacgtttgtgcgcctgcggtggttgaagaggtttctgccatacgtttctcctgatgatattgctgaagtgttccacataatgacgtggggaaaaggtgatatatcccacaatataaactccatctcatattgtgggataaaataatgaaaattaacgatcgttttgcgtagcgcctcgcaggaaacttctttcaaactggacgtttgtacagcacaattctattttgtgcgggtaagttgttgcgtcaggaggcgttgtggatttctcaatcatggtttacgcagttattgcattggtgggtgtggcaattggctggctgtttgccagttatcaacatgcgcagcaaaaagccgagcaattagctgaacgtgaagagatggtcgcggagttaagcgcggcaaaacaacaaattacccaaagcgagcactggcgcgcagagtgtgaattgctcaataacgaagtgcgcagcctgcaaagtattaacacctcgctggaggccgatctgcgtgaagtgaccacgcggatggaagccgcacagcaacacgctgacgataaaattcgccagatgatcaacagcgaacagcgcctcagtgagcaatttgaaaaccttgccaaccgtatttttgaacacagtaatcgtcgggttgatgagcaaaatcgccagagtctgaacagtcttttgtcgccgttgcgtgaacaactggatggtttccgccgtcaggtccaggacagctttggtaaagaagcccaagaacgtcataccctgactcacgaaatccgcaacctccagcaactcaacgcccagatggcccaggaagcgatcaacctgacgcgtgcgctgaaaggcgacaataaaacccagggcaactggggcgaggtagtattgacgcgggtgctggaggcttccggtctgcgtgaagggtatgaatatgaaacccaggtcagcatcgaaaatgacgcccgctcgcggatgcagccggatgtcatcgtgcggttgccgcagggaaaagatgtggtgatcgacgccaaaatgacgctggtcgcctatgaacgctatttcaacgccgaagatgactacacccgcgaaagcgcgctacaggaacatatcgcgtcggtacgtaaccatatccgtttgctgggacgcaaagattatcaacagctgccggggctgcgaactctggattacgtgctgatgtttattcccgttgaacccgcttttttactggcgcttgaccgtcagccggagctgatcaccgaagcgttgaaaaacaatatcatgctggttagcccgactacgctgctggtggcgctgcgcactatcgccaacctgtggcgttatgagcatcaaagccgcaacgcccagcaaatcgccgatcgtgccagcaagctgtacgacaagatgcgtttgtttgtcgatgacatgtccgcgattggtcaaagtctcgacaaagcgcaggataactatcgccaggcaatgaaaaaactctcttcaggtcgcggaaatgtgctggcgcaggcagaagcgtttcgcggtttaggggtagaaattaaacgcgagattaatccggatttggctgaacaggcggtgagccaggatgaagagtatcgacttcggtcggttccggagcagccgaatgatgaagcttatcaacgcgatgatgaatataatcagcagtcgcgctagcccattgggggtagttaagccgggtagaaatctagggcatcgacgcccaatctgttacacttctggaacaattttttgatgagcaggcattgagatggtggataagtcacaagaaacgacgcactttggttttcagaccgtcgcgaaggaacaaaaagcggatatggtcgcccacgttttccattccgtggcatcaaaatacgatgtcatgaatgatttgatgtcattcggtattcatcgtttgtggaagcgattcacgattgattgcagcggcgtacgccgtgggcagaccgtgctggatctggctggtggcaccggcgacctgacagcgaaattctctcgcctggtcggagaaactggcaaagtggtccttgctgatatcaatgaatccatgctcaaaatgggccgcgagaagctgcgtaatatcggtgtgattggcaacgttgagtatgttcaggcgaacgctgaggcgctgccgttcccggataacacctttgattgcatcaccatttcgtttggtctgcgtaacgtcaccgacaaagataaagcactgcgttcaatgtatcgcgtgctgaaacccggcggccgcctgctggtacttgagttctcgaagccaattatcgagccgctgagcaaagcctatgatgcatactccttccatgtgctgccgcgtattggctcactggtcgcgaacgacgccgacagctaccgttatctggcagaatccatccgtatgcatcccgatcaggataccctgaaaaccatgatgcaggatgccggattcgaaagtgtcgactactacaatctgacggcaggggttgtggcgctgcatcgtggttataagttctgacaggagaccggaaatgccttttaaacctttagtgacggcaggaattgaaagtctgctcaacaccttcctgtatcgctcacccgcgctgaaaacggcccgctcgcgtctgttgggcaaagtgctgcgcgtggaggtaaaaggcttttcgacgtcattgattctggtgttcagcgaacgccaggtcgatgtactgggcgaatgggcaggcgatgctgactgcaccgttatcgcttacgccagcgtgttgccgaaacttcgcgatcgccagcagcttgccgcactgattcgcagtggtgagctggaagtgcagggtgatattcaggtggtgcaaaacttcgttgcgctggcagatctggcagagttcgaccctgcggaactgctggccccttataccggtgatatcgccgctgaaggtatcagcaaagccctgcgcggaggcgcaaagttcctgcatcacggcattaagcgccagcaatgttatgtggcggaagccattactgaagagtggcgtatggcacccggtccgcttgaagtggcctggtttgcggaagagacggctgccgtcgagcgtgctgttgatgccctgaccaaacggctggaaaaactggaggctaaatgacgccaggtgaagtacggcgcctatatttcatcattcgcacttttttaagctacggacttgatgaactgatccccaaaatgcgtatcaccctgccgctacggctatggcgatactcattattctggatgccaaatcggcataaagacaaacctttaggtgagcgactacgactggccctgcaagaactgggaccggtatggatcaagttcgggcagatgttatcaacccgccgcgatctttttccgccgcatattgccgatcagctggcgttattgcaggacaaagtcgctccgtttgatggcaagctggcgaagcagcagattgaagctgcaatgggcggcttgccggtagaagcgtggtttgacgattttgaaatcaagccgctggcttctgcttctatcgcccaggttcataccgcgcgattgaaatcgaatggtaaagaggtggtgattaaagttatccgcccggatattttgccggtcattaaagcggatctgaaacttatctaccgtctggctcgctgggtgccgcgtttgctgccggatggtcgccgtctgcgcccaaccgaagtggtgcgcgagtacgaaaagaccttgattgatgaactgaatttgctgcgggaatctgccaacgccattcagcttcgacgcaattttgaagacagcccgatgctctacatcccggaagtttaccctgactattgtagtgaagggatgatggtgatggagcgtatttacggcattccggtgtctgatgttgcgacgctggagaaaaacggcaccaacatgaaattgctggcggaacgcggcgtgcaggtgttcttcactcaggtctttcgcgacagctttttccatgctgatatgcaccctggcaacatcttcgtaagctatgaacacccggaaaacccgaaatatatcggcattgattgcgggattgttggctcgctaaacaaagaagataaacgctatctggcggaaaactttatcgccttctttaatcgcgactatcgcaaagtggcagagctacacgtcgattctggttgggtgccaccagataccaacgttgaagagttcgaatttgccattcgtacggtctgtgaacctatctttgagaaaccgctggccgaaatttcgtttggacatgtactgttaaatctgtttaatacggcgcgtcgcttcaatatggaagtgcagccgcaactggtgttactccagaaaaccctgctctacgtcgaaggggtaggacgccagctttatccgcaactcgatttatggaaaacggcgaagcctttcctggagtcgtggattaaagatcaggtcggtattcctgcgctggtgagagcatttaaagaaaaagcgccgttctgggtcgaaaaaatgccagaactgcccgaactggtttacgacagtttgcgccagggcaagtatttacagcatagtgttgataagattgcccgcgagcttcagtcaaatcatgtacgtcagggacaatcgcgttattttctcggaattggcgctacgttagtattaagtggcacattcttgttggtcagccgacctgaatgggggttgatgcccggctggttaatggcaggtggtctgatcgcctggtttgtcggttggcgcaaaacacgctgattttttcatcgctcaaggcgggccgtgtaacgtataatgcggctttgtttaatcatcatctaccacagaggaacatgtatgggtggtatcagtatttggcagttattgattattgccgtcatcgttgtactgctttttggcaccaaaaagctcggctccatcggttccgatcttggtgcgtcgatcaaaggctttaaaaaagcaatgagcgatgatgaaccaaagcaggataaaaccagccaggatgctgattttactgcgaaaactatcgccgataagcaggcggatacgaatcaggaacaggctaaaacagaagacgcgaagcgccacgataaagagcaggtgtaatctgtgtttgatatcggttttagcgaactgctattggtgttcatcatcggcctcgtcgttctggggccgcaacgactgcctgtggcggtaaaaacggtagcgggctggattcgcgcgttgcgttcactggcgacaacggtgcagaacgaactgacccaggagttaaaactccaggagtttcaggacagtctgaaaaaggttgaaaaggcgagcctcactaacctgacgcccgaactgaaagcgtcgatggatgaattacgccaggctgcggagtcgatgaagcgttcctacgttgcaaacgatcctgaaaaggcgagcgatgaagcgcacaccatccataacccggtggtgaaagacaatgaaactgcgcatgaaggcgtaacgcctgctgctgcacaaacgcaggccagttcgccggaacagaagccagaaactacgccagagccggtggtaaaacctgctgcggacgctgaaccgaaaaccgctgcaccttccccttcgtcgagtgataaaccgtaaacatgtctgtagaagatactcaaccgcttatcacgcatctgattgagctgcgtaagcgtctgctgaactgcattatctcggtgatcgtgatattcctgtgtctggtctatttcgccaatgacatctatcacctggtatccgcgccattgatcaagcagttgccgcaaggttcaacgatgatcgccaccgacgtggcctcgccgttctttacgccgatcaagctgacctttatggtgtcgctgattctgtcagcgccggtgattctctatcaggtgtgggcgtttatcgccccagcgctgtataagcatgaacgtcgcctggtggtgccgctgctggtttccagctctctgctgttttatatcggcatggcgttcgcctactttgtggtctttccgctggcatttggcttccttgccaataccgcgccggaaggggtacaggtatccaccgacatcgcgagctatttaagcttcgttatggcgctgtttatggcgtttggtgtctcctttgaagtgccggtggcaattgtgctgctgtgctggatggggattacctcgccagaagacttacgcaaaaaacgcccgtatgtgctggttggtgcattcgttgtcgggatgttgctgacgccgccggatgtcttctcgcaaacgctgttggcgatccctatgtactgcctgtttgaaatcggtgtcttcttctcacgcttttacgttggtaaagggcgaaaccgggaagaggaaaacgacgctgaagcagaaagcgaaaaaactgaagaataaattcaaccgcccgtcagggcggttgtcatatggagtacaggatgtttgatatcggcgttaatttgaccagctcgcaatttgcgaaagaccgtgatgatgttgtagcgcgcgcttttgacgcgggagttaatgggctactcatcaccggtaccaatctgcgtgaaagccagcaggcgcaaaagctggcgcgtcagtattcgtcctgttggtcaacggcgggcgtacatcctcacgacagcagccagtggcaagctgtgactgaagaagcgattattgagctggccgcgcagccagaagtggtggcgattggtgaatgtggtctcgactttaaccgcaacttttcgacgccggaagagcaggaactcgcttttgttgcccagctacgcattgccgcagaattaaacatgccggtatttatgcactgtcgcgatgcccacgagcggtttatgacattgctggagccgtggctggataaactgcctggtgcggttcttcattgctttaccggcacacgcgaagagatgcaggcgtgcgtggcgcgtggaatttatatcggcattaccggttgggtttgcgatgaacgacgcgggctggagctgcggaaattgttgccgttgattccggcggagaaattgctgatcgaaactgatgcgccgtatctgctccctcgcgatctcacgccaaagccatcatcccggcgcaacgagccagcccatctgccccatattttgcaacgtattgcgcactggcgtggagaagatgccgcatggctggctgccaccacggatgccaatgtcaaaacactgtttgggattgcgttttagagtttgcggaactcggtgttcttcacactgtgcttaatctctttattaataagattaagcaatagcatggagcgagcctcgccatcgggctcggtgaaaatggcctgaaaaccttcgaatgcgccttcagtaataatcactttatcaccaggatacggcgtcgatggatcgacaatatctttcggtttatacactgataactgatgaatcaccgccgatgggactatcgctggcgacgcgccaaagcgcacgaagtggctgacaccacgggtcgcgttgatagtcgtggtatgaatcacttccggatcgaactccacaaacaagtagttggggaacaatggctcactgactgcagtacgtttgccacgcacgattttttccagggtgatcatcggtgccaggcaattcacagcctgtctttcgaggtgttcctgggcacgttgaagttgcccgcgcttgcagtacagtaaataccaggattgcataatgactcttatccgtttaatcggggcgcaaggatagcaaaagctttacgctaagttaattatattccccggtttgcgttataccgtcagagttcacgctaatttaacaaatttacagcatcgcaaagatgaacgccgtataatgggcgcagattaagaggctacaatggacgccatgaaatataacgatttacgcgacttcttgacgctgcttgaacagcagggtgagctaaaacgtatcacgctcccggtggatccgcacctggaaatcactgaaattgctgaccgcactttgcgtgccggtgggcctgcgctgttgttcgaaaaccctaaaggctactcaatgccggtgctgtgcaacctgttcggtacgccaaagcgcgtggcgatgggcatggggcaggaagatgtttcggcgctgcgtgaagttggtaaattattggcgtttctgaaagagccggagccgccaaaaggtttccgcgacctgtttgataaactgccgcagtttaagcaagtattgaacatgccgacaaagcgactgcgtggtgcaccctgccaacaaaaaatcgtctctggcgatgacgtcgatctcaatcgcattcccattatgacctgctggccggaagatgccgcgccgctgattacctgggggctcaccgtaacgcgcggcccgcataaagagcggcagaatctgggcatttatcgccagcagctaattggtaaaaacaaactgattatgcgctggctgtcgcatcgcggcggcgcgttggattatcaggagtggtgtgcggcgcatccgggcgaacgtttcccggtttctgtggcgctgggtgccgatcctgccacgattctcggtgcagtcacccccgttccggatacgctttcagagtatgcgtttgccggattgctgcgcggtaccaagaccgaagtggtgaagtgtatctccaatgaccttgaagtgcccgccagtgcggagattgtgctggaagggtatatcgaacaaggcgaaactgcgccggaagggccgtatggcgaccacaccggttactataacgaagtcgatagttttccggtatttaccgtgacgcatattacccagcgtgaagatgcgatttatcattccacctataccgggcgtccgccagatgaacctgcggtactgggtgtagcactgaacgaagtgttcgtgccgattctgcaaaaacagttcccggaaattgtcgatttttatctgccgccggaaggctgttcttatcgtctggcggtagtgacgatcaaaaaacagtacgccggacacgcgaagcgcgtcatgatgggcgtctggtcgttcttacgccagtttatgtacactaaatttgtgatcgtttgcgatgatgacgtcaacgcccgcgactggaacgatgtgatttgggcgattaccacccgtatggacccggcgcgggatactgttctggtagaaaatacgcctattgattatctggattttgcctcgcctgtctccgggctgggttcaaaaatggggctggatgccacgaataaatggccgggtgaaacccagcgtgaatggggacgtcccatcaaaaaagatccagatgttgtcgcgcatattgacgccatttgggatgaactggctatttttaacaacggtaaaagcgcctgatgcgcgtttgttttgccctatttatcgatccgacagagaaagcgcatgacaaccttaagctgtaaagtgacctcggtagaagctatcacggataccgtatatcgtgtccgcatcgtgccagacgcggccttttcttttcgtgctggtcagtatttgatggtagtgatggatgagcgcgacaaacgtccgttctcaatggcttcgacgccagatgaaaaagggtttatcgagctgcatattggcgcttctgaaatcaacctttacgcgaaagcagtcatggaccgcatcctcaaagatcatcaaatcgtggtcgatattccccacggagaagcgtggctgcgcgatgatgaagagcgtccgatgattttgattgcgggcggcaccgggttctcttatgcccgctcgattttgctgacagcgttggcgcgtaacccaaaccgtgatatcaccatttactggggcgggcgtgaagagcagcatctgtatgatctctgcgagcttgaggcgctttcgttgaagcatcctggtctacaagtggtgccggtggttgaacaaccggaagcgggctggcgtgggcgtactggcaccgtgttaacggcggtattgcaggatcatggtacgctggcagagcatgatatctatattgccggacgttttgagatggcgaaaattgcccgtgacctgttttgcagcgagcgtaatgcgcgggaagatcgcctgtttggcgatgcgtttgcatttatctgagatataaaaaaacccgcccctgacaggcgggaagaacggcaactaaaactttattcagtggcatttagatctatgtcgcatccggcaattggtgcacgatgcctgatgcgacgctggcgcgtcttatcaggcctacattggtgccggatcggtagaccggataaggcgttcacgccgcatccggcaagtggttaaacccgctcaaacaccgtcgcaataccctgacccagaccgatacacatcgtcgccagaccaaactgaacgtctttgcgctccatcagattcagcagcgtggtgctgatacgcgcaccggaacaacccagcggatgacccagcgcgatcgcgccaccgttgaggttgatcttctcgtcaatctgctccattaacccgagatctttaatacacggcaggatctgcgcggcaaaggcttcgttcatctcgaatacgccgatatcgctggcagaaagccccgcttttttcagcgccagcttcgaggccggaaccggaccataacccataatcgatgggtcacaacccacaaccgccatcgaacgcacgcaggcgcgcggcttaagacctaagtcacgggcgcggctttcactcatcaccagcatggcagctgcgccatcggaaagcgcagaagatgtacccgccgttaccgtaccgctgacgggatcaaacgccggacgcagtgtggcgagggcttccacggtggtttccgggcgaatcacttcgtcgtaattaaactgcttcaatacgccgtcggcatcgtgaccaccggtcgggatgatttcatttttaaatgcgcctgactgcgtggcggcccaggcgcgggcgtgtgaccgtgcggcaaaggcatcctgcatttcacggctgataccgtgcatacgcgccagcatttctgccgttaagcccatcatgcccgccgctttggcgacattgcggctcaggccggggtgaaaatcgacgccgtgactcatcggcacatggcccatatgctccacgccgccaaccagacatgcctgcgcatcgccggtcatgatcattcgtgccgcgtcatgcagtgcctgcatggatgaaccacacaagcgattgacggtcaccgccgggacagagtgcggcacttctgccaacagcgccgcgttacgggcgatattaaaaccctgctccagcgtttgctgcacacaaccccagtaaatatcgtcgagggccgctgcttccagcgccgggttacgcgccagcaggctacgcattaaatgagcggagagatcttccgcacgcacgttacgaaaagcaccgcccttcgaacggcccatcggggtgcgaattgcatcgacaatgacaacctgttccattgtgactccttaagccgttttcaggtcgccaaccggacgggctggctcaaccgggggatagtacggttcgttatgacgtgctttattacgcagaccttccggtacttcatacagcgggccgaggtgctgatattgctgtgccatatcgaggtattttgcgctgccgagggtgtccaaccagcggaacgcgccgccgtggaacggagggaagcccaggccgtagaccagcgccatatccgcttctgccggagtggcgataatgccctcttccagacagcggaccacttcgttgaccatcgggatcatcatgcgggcgataatctcttcctcgctgaaatcgcgcttcggctggctcacttttgccagcaggtcgtcaacgacgacatcttcttctttcttcggcttacctttgctgtcttctttataacgccagaaaccgaggccgttcttctgaccaaagcggttggcattaaacagcgcgtcgatggcatcgcgataatctttctgcatccgctgcgggaagcctgctgccatgacagtctgggcgtgatgcgcggtgtcaatgcccacaacatccagcagatatgccggacccatcggccagccaaactgtttttccatcactttgtcgatcttgcggaaatccgcgccgtcgcgcagcaactggctgaaaccggcgaaataggggaacagtacacggttgacgaagaagccggggcagtcgttaaccacaatcggcgttttgcccatcttgctcgcccaggcgacgactttcgcgatggtttcgtcggagcttttctcgccgcgaataatttctactaacggcattcggtggaccgggttaaagaagtgcatcccgcagaagttttccggacgttccagcgcgttggccagttcgctgataggaatggttgaagtgttagacgccagtacggtatccgggcgtactttctgctcggtttctgccagcactgcttttttcactttcgggttttcaacaaccgcttctaccacaacatccacgcggtcaaacccggcgtagtcgagcgttgggtgaattgtggagatcacgccagccagtttcagaccatcgatcttgccgcgctcaagctgcttgttcagcagtttcgcggcttcggtcatgccgagggttaacgacttgtcgttgatatctttcatgacaaccggcacgcctttccacgcagactggtaggcgatgccgccgcccataatgcctgcgcccagcacagcggcctgtttcggggtttcaacatctttggtgagtttcttcgctttaccttttacatattgatcgttaaggaaaatgccgaccagtgcgcgggcttcgttggtatgcgccagcgggacaaaacttttgttttccaggtttaaggcttcttcacgaccaaaacgggccgcagcttcaatggtttttactgcggtgatgggggccggataatgtttccccgccgtttgcgcgaccatccctttagcgatggtgaagctcatggcggcttcaatcttgctcagttttagcggttccagcttcggctgacgttttgctttccagtcgaggtcgccgttaatggcctggcgtaaaatcgccatcgccccttcaaccagtttttctgctttgactacaccatccaccagaccgattttcagcgcctgatccgcgccgacatctttaccggcggcaatgatttccagcgcactgtcagcaccgagcatacgtggcatacgtacagaaccgccaaagcccggcatgatgcccagtttggtttccggcagaccgatgcgcagatccggcgtcgccagacgataatcggtcgccagcacgcattcgcagccaccgcccagcgcatagccgttgacggcagcaatggtcggcaccgggagatcttccaggcgattaaacacgctattggcaaagtgcagccactgacttaactgttcttcaggaacgaggaacagggacaaaaattcggtgatatcagcaccgacgataaaggctgctttgttcgaacgcagcagcagcccttttagatctgattgctgttccagcacgccgatggcctcgccgaggctggcgacggtggcagtgtcgagtttattaactgaacctggggcatcaaataccagttcggcaatgccatcttccagccagtcaaggtacagggtgtcgcctttgtaaagcatgtcagtctcctgaatccgcaaggtgatctggtcgtaccagatgcatcgaagtgtgtattttgtgttaaaaatatgcaaataaaatattaaggaaatgccgatctgatcacgctcggcagaaatcacgctctggatgaacgatgtgctaagatgcggagacttaaggtcaaaaaaacagaagggtaaaaaatggaatcactggcctcgctctataaaaatcatatagctaccttacaggaacggactcgcgatgcgctggcgcgcttcaagctggatgcgttacttattcactccggcgaactgttcaacgtttttctcgacgatcatccctatccgtttaaagtgaacccgcaattcaaagcgtgggtgccggtaactcaggtgccaaactgctggctgctggtggatggcgtgaataagccgaaactgtggttttatctgccggttgattactggcacaacgtcgaaccgctgccgaactccttctggactgaagatgtagaagtgatcgcgctgccaaaagccgatggcattggtagtctgttgcctgctgcgcgcggcaatatcggttatatcggtccggtgccagaacgtgcgctgcaactgggtattgaggccagcaatatcaacccgaaaggggtgatcgactacctgcattactatcgctccttcaaaaccgngtacgaactggcctntntgngngaagnncanaaaanggnggnnannggtnnnnnnnngnnnnannannnntncnntnnngnnnnnnnnnnntnnnnnnnnannntnncnnnnnnnncnnnnncngnnnnnnnnnnnncnnnnnnncntnnnnnnannntnnngnnnntnannnannnnnnnnngnnntnnnntnnnncnaannngnncnncnngnnncngnannnnnnnnnnnnnttcctgctggatgccggggccgaatataacggctatgcggctgatctaacccgtacctggtcggcaaaaagcgacaacgactacgcacagctggtgaaagacgtaaatgatgagcaactggcgctgatcgccaccatgaaagcaggcgtcagctatgtggattaccatatccagttccatcagcgcatcgccaaactgctgcgtaaacatcaaatcatcaccgatatgagtgaagaagcgatggtcgaaaacgatctcaccggaccgtttatgccgcacggtatcggccatccgctgggcctgcaggtgcatgacgtagccggttttatgcaggatgatagcggtacgcacctcgcggcaccggcaaaatatccgtacctgcgctgcacccgtattctccagccgggcatggtgttaaccatcgaaccgggtatctacttcatcgaatcgcttctggcaccgtggcgtgaagggcagttcagcaaacacttcaactggcagaaaattgaagcactgaaaccgttcggcggcattcgtatcgaagacaacgtggtgattcacgaaaacaacgtggaaaacatgacccgggatctgaaactggcgtgatggaaagctggttaattcctgcggcaccggtcacggtcgttgaagagatcaaaaagagccgcttcattacgctgttggcttcgcgatggtttcgtcggagcttttctcgccgcgaataatttctactaacggcattcggtggaccgggttaaagaagtgcatcccgcagaagttttccggacgttccagcgcgttggccagttcgctgataggaatggttgaagtgttagacgccagtacggtatccgggcgtactttctgctcggtttctgccagcactgcttttttcactttcgggttttcaacaaccgcttctaccacaacatccacgcggtcaaacccggcgtagtcgagcgttgggtgaattgtggagatcacgccagccagtttcagaccatcgatcttgccgcgctcaagctgcttgttcagcagtttcgcggcttcggtcatgccgagggttaacgacttgtcgttgatatctttcatgacaaccggcacgcctttccacgcagactggtaggcgatgccgccgcccataatgcctgcgcccagcacagcggcctgtttcggggtttcaacatctttggtgagtttcttcgctttaccttttacatattgatcgttaaggaaaatgccgaccagtgcgcgggcttcgttggtatgcgccagcgggacaaaacttttgttttccaggtttaaggcttcttcacgaccaaaacgggccgcagcttcaatggtttttactgcggtgatgggggccggataatgtttccccgccgtttgcgcgaccatccctttagcgatggtgaagctcatggcggcttcaatcttgctcagttttagcggttccagcttcggctgacgttttgctttccagtcgaggtcgccgttaatggcctggcgtaaaatcgccatcgccccttcaaccagtttttctgctttgactacaccatccaccagaccgattttcagcgcctgatccgcgccgacatctttaccggcggcaatgatttccagcgcactgtcagcaccgagcatacgtggcatacgtacagaaccgccaaagcccggcatgatgcccagtttggtttccggcagaccgatgcgcagatccggcgtcgccagacgataatcggtcgccagcacgcattcgcagccaccgcccagcgcatagccgttgacggcagcaatggtcggcaccgggagatcttccaggcgattaaacacgctattggcaaagtgcagccactgacttaactgttcttcaggaacgaggaacagggacaaaaattcggtgatatcagcaccgacgataaaggctgctttgttcgaacgcagcagcagcccttttagatctgattgctgttccagcacgccgatggcctcgccgaggctggcgacggtggcagtgtcgagtttattaactgaacctggggcatcaaataccagttcggcaatgccatcttccagccagtcaaggtacagggtgtcgcctttgtaaagcatgtcagtctcctgaatccgcaaggtgatctggtcgtaccagatgcatcgaagtgtgtattttgtgttaaaaatatgcaaataaaatattaaggaaatgccgatctgatcacgctcggcagaaatcacgctctggatgaacgatgtgctaagatgcggagacttaaggtcaaaaaaacagaagggtaaaaaatggaatcactggcctcgctctataaaaatcatatagctaccttacaggaacggactcgcgatgcgctggcgcgcttcaagctggatgcgttacttattcactccggcgaactgttcaacgtttttctcgacgatcatccctatccgtttaaagtgaacccgcaattcaaagcgtgggtgccggtaactcaggtgccaaactgctggctgctggtggatggcgtgaataagccgaaactgtggttttatctgccggttgattactggcacaacgtcgaaccgctgccgaactccttctggactgaagatgtagaagtgatcgcgctgccaaaagccgatggcattggtagtctgttgcctgctgcgcgcggcaatatcggttatatcggtccggtgccagaacgtgcgctgcaactgggtattgaggccagcaatatcaacccgaaaggggtgatcgactacctgcattactatcgctccttcaaaaccgagtacgaactggcctgtatgcgtgaagcgcagaaaatggcggtcaacggtcatcgcgcggcagaagaagcgttccgttctggcatgagcgagttcgatatcaacattgcctatctgaccgcgaccggtcatcgtgataccgacgtaccttatagcaacattgtggcgcttaacgaacacgctgcggtgttgcattacaccaaactggaccaccaggcaccggaagagatgcgcagcttcctgctggatgccggggccgaatataacggctatgcggctgatctaacccgtacctggtcggcaaaaagcgacaacgactacgcacagctggtgaaagacgtaaatgatgagcaactggcgctgatcgccaccatgaaagcaggcgtcagctatgtggattaccatatccagttccatcagcgcatcgccaaactgctgcgtaaacatcaaatcatcaccgatatgagtgaagaagcgatggtcgaaaacgatctcaccggaccgtttatgccgcacggtatcggccatccgctgggcctgcaggtgcatgacgtagccggttttatgcaggatgatagcggtacgcacctcgcggcaccggcaaaatatccgtacctgcgctgcacccgtattctccagccgggcatggtgttaaccatcgaaccgggtatctacttcatcgaatcgcttctggcaccgtggcgtgaagggcagttcagcaaacacttcaactggcagaaaattgaagcactgaaaccgttcggcggcattcgtatcgaagacaacgtggtgattcacgaaaacaacgtggaaaacatgacccgggatctgaaactggcgtgatggaaagctggttaattcctgcggcaccggtcacggtcgttgaagagatcaaaaagagccgcttcattacgctgttggcgcataccgatggcgttgaggcggcaaaagcgtttgttgaatcggtgcgggcagaacaccccgatgcccgccaccattgcgtggcgtgggtggcgggtgcgccggatgattctcaacaactgggtttctctgacgacggggagccggcgggaacggcaggtaaaccgatgctcgcccaactaatgggcagcggcgtcggggaaattaccgctgtggtggtgcgctactacggcggcatattgcttggcaccggtgggttagtgaaagcgtatggcggcggcgtgaatcaggcgctgcgccagctaacgacccaacgcaagacaccattaaccgaatatactttgcaatgtgaatatagtcagttaaccggcattgaagcgttgctggggcagtgtgacggcaaaattatcaacagtgattatcaggcattcgttctgctgcgggtggcgcttccggcggcgaaagtggctgaattttccgcaaagctggcggattttagccgtggttcattgcaattgttagcgattgaagaataatccccacttcgttttgcagaactaaggaagcggcagagatgcattttcgcgccattacccgaatcgttggactactggtcatcttattttcagggaccatgattatccctgggctggtagcactcatctaccgggatggagcgggacgcgcttttacccagaccttttttgtcgccctcgccattggctctatgctttggtggccgaaccgcaaagagaagggcgaactgaaatcccgtgaggggtttctgatagtggtgctgttctggaccgtgctgggtagcgtcggtgcgctcccttttatcttctcggaaagcccgaacctcacgattaccgatgcgttttttgaatctttctctggcctgaccaccacgggggccactacgctggtggggctggattcgctccctcatgccatcctcttttatcgccagatgctgcaatggtttggcggtatggggatcatcgtgctggcggttgcgatactgcctatcctcggcgtgggtgggatgcagctctatcgcgcagaaatgcccggcccgctgaaagataacaaaatgcgcccgcgaattgcggaaacggcgaaaaccctgtggttgatttatgtcttgctgaccgtcgcctgtgcgctggcgttgtggtttgctggaatggatgcctttgatgccatcggccatagctttgcgaccatcgctattggcggcttctcgacacatgatgccagtatcggttatttcgacagcccgactattaacactatcattgctatcttcctgctgatctctggctgtaactacggtctgcacttttcactgttaagtgggcgtagtctgaaggtttattggcgcgatccggaatttcgcatgtttatcggcgtacagttttcactggtggttatttgtacactcgtactgtggtttcataatgtctacagttcggcgctgatgacaattaaccaagcgtttttccaggtggtgtcgatggcgacaaccgccgggtttacaactgacagcattgcccgctggccgctctttttgccggtactgcttttatgttcagcttttatcggcggttgcgccgggtcaacgggcggtggcctgaaagtgatccgcatcctgctgctgtttaagcaggggaaccgtgagctgaaacgactggtgcatccgaacgccgtctatagcattaagctggggaatcgcgcactgccggaacgtatcctcgaagccgtttggggatttttctccgcctatgcattggtgtttattgtcagtatgctggcgattatcgccacgggcgtggatgacttttctgcctttgcctcggttgttgcaacattgaataacctggggccagggcttggcgtggttgctgataactttaccagtatgaacccggtggctaaatggatcctgattgccaacatgctgtttggtcgtctcgaggtctttacattgctggtgctctttaccccgactttctggcgtgaatgatggagtaatacgtgaaaacattaattcttttctcaacaagggacggacaaacgcgcgagattgcctcctacctggcttcggaactgaaagaactggggatccaggcggatgtcgccaatgtgcaccgcattgaagaaccacaatgggaaaactatgaccgtgtggttattggcgcttctattcgctatggtcactaccattctgcgttccaggaatttgtcaaaaagcatgcgacgcggttgaattcgatgccgagtgccttttactccgtaaatctggtggcgcgtaaaccggagaagcgtactccacagaccaacagctacgcgcggaagtttctgatgaactcgcaatggcgtcccgatcgctgtgccgtcattgccggggcgctgcgttacccacgttatcgctggtacgaccgttttatgatcaagctgattatgaagatgtcaggcggtgaaacggatacgcgcaaagaagttgtctataccgattgggagcaggtggcgaatttcgcccgagaaatcgcccatttaaccgacaaaccgacgctgaaataagcataaagaataaaaaatgcgcggtcagaaaattattttaaatttcctcttgtcaggccggaataactccctataatgcgccaccactgacacggaacaacggcaaacacgccgccgggtcagcgggattctcctgagaattccggcagagaaagcaaaaataaatgcttgactctgtagcgggaaagcgtattatgcacaccccgcgccgctgagaaaaagcgaagcggcactgctctttaacaatttatcagacaatctgtgtgggcactcgaagatacggattcttaacgtcgcaagacgaaaaatgaataccaagtctcaagagtgaacacgtaattcattacgaagtttaattctttgagcatcaaacttttaaattgaagagtttgatcatggctcagattgaacgctggcggcaggcctaacacatgcaagtcgaacggtaacaggaaacagcttgctgtttcgctgacgagtggcggacgggtgagtaatgtctgggaaactgcctgatggagggggataactactggaaacggtagctaataccgcataacgtcgcaagaccaaagagggggaccttcgggcctcttgccatcggatgtgcccagatgggattagctagtaggtggggtaaaggctcacctaggcgacgatccctagctggtctgagaggatgaccagccacactggaactgagacacggtccagactcctacgggaggcagcagtggggaatattgcacaatgggcgcaagcctgatgcagccatgccgcgtgtatgaagaaggccttcgggttgtaaagtactttcagcggggaggaagggagtaaagttaatacctttgctcattgacgttacccgcagaagaagcaccggctaactccgtgccagcagccgcggtaatacggagggtgcaagcgttaatcggaattactgggcgtaaagcgcacgcaggcggtttgttaagtcagatgtgaaatccccgggctcaacctgggaactgcatctgatactggcaagcttgagtctcgtagaggggggtagaattccaggtgtagcggtgaaatgcgtagagatctggaggaataccggtggcgaaggcggccccctggacgaagactgacgctcaggtgcgaaagcgtggggagcaaacaggattagataccctggtagtccacgccgtaaacgatgtcgacttggaggttgtgcccttgaggcgtggcttccggagctaacgcgttaagtcgaccgcctggggagtacggccgcaaggttaaaactcaaatgaattgacgggggcccgcacaagcggtggagcatgtggtttaattcgatgcaacgcgaagaaccttacctggtcttgacatccacggaagttttcagagatgagaatgtgccttcgggaaccgtgagacaggtgctgcatggctgtcgtcagctcgtgttgtgaaatgttgggttaagtcccgcaacgagcgcaacccttatcctttgttgccagcggtccggccgggaactcaaaggagactgccagtgataaactggaggaaggtggggatgacgtcaagtcatcatggcccttacgaccagggctacacacgtgctacaatggcgcatacaaagagaagcgacctcgcgagagcaagcggacctcataaagtgcgtcgtagtccggattggagtctgcaactcgactccatgaagtcggaatcgctagtaatcgtggatcagaatgccacggtgaatacgttcccgggccttgtacacaccgcccgtcacaccatgggagtgggttgcaaaagaagtaggtagcttaaccttcgggagggcgcttaccactttgtgattcatgactggggtgaagtcgtaacaaggtaaccgtaggggaacctgcggttggatcacctccttaccttaaagaagcgtactttgcagtgctcacacagattgtctgatagaaagtgaaaagcaaggcgtcttgcgaagcagactgacacgtccccttcgtctagaggcccaggacaccgccctttcacggcggtaacaggggttcgaatcccctagggnacgccacttgctggtttgtgagtgaaagtcacctgccttaatatctcaaaactcatcttcgggtgatgtttgagatatttgctctttaaaaatctggatcaagctgaaaattgaaacactgaacaacgagagttgttcgtgagtctctcaaattttcgcaacacgatgatgaatcgcaagaaacatcttcgggttgtgaggttaagcgactaagcgtacacggtggatgccctggcagtcagaggcgatgaaggacgtgctaatctgcgataagcgtcggtgaggtgatatgaaccgttataaccggcgatttccgaatggggaaacccagtgtgtttcgacacactatcattaactgaatccataggttaatgaggcgaaccgggggaactgaaacatctaagtaccccgaggaaaagaaatcaaccgagattcccccagtagcggcgagcgaacggggaggagcccagagcctgaatcagtgtgtgtgttagtggaagcgtctggaaaggcgtgcgatacagggtgacagccccgtacacaaaaatgcacatattgtgagctcgatgagtagggcgggacacgtggtatcctgtctgaatatggggggaccatcctccaaggctaaatactcctgactgaccgatagtgaaccagtaccgtgagggaaaggcgaaaagaaccccggcgaggggagtgaaaaagaacctgaaaccgtgtacgtacaagcagtgggagcctcttaatggggtgactgcgtaccttttgtataatgggtcagcgacttatattctgtagcaaggttaaccgaataggggagccgaagggaaaccgagtcttaactgggcgttaagttgcagggtatagacccgaaacccggtgatctagccatgggcaggttgaaggttgggtaacactaactggaggaccgaaccgactaatgttgaaaaattagcggatgacttgtggctgggggtgaaaggccaatcaaaccgggagatagctggttctccccgaaagctatttaggtagcgcctcgtgaattcatctccgggggtagagcactgtttcggcaagggggtcatcccgacttaccaacccgatgcaaactgcgaataccggagaatgttatcacgggagacacacggcgggtgctaacgtccgtcgtgaagagggaaacaacccagaccgccagctaaggtcccaaagtcatggttaagtgggaaacgatgtgggaaggcccagacagccaggatgttggcttagaagcagccatcatttaaagaaagcgtaatagctcactggtcgagtcggcctgcgcggaagatgtaacggggctaaaccatgcaccgaagctgcggcagcgacactatgtgttgttgggtaggggagcgttctgtaagcctgtgaaggtggcctgtgagggttgctggaggtatcagaagtgcgaatgctgacataagtaacgataaagcgggtgaaaagcccgctcgccggaagaccaagggttcctgtccaacgttaatcggggcagggtgagtcgacccctaaggcgaggccgaaaggcgtagtcgatgggaaacaggttaatattcctgtacttggtgttactgcgaaggggggacggagaaggctatgttggccgggcgacggttgtcccggtttaagcgtgtaggctggttttccaggcaaatccggaaaaccaaggctgaggcgtgatgacgaggcactacggtgctgaagcgacaaatgccctgcttccaggaaaagcctctaagcatcaggtaacatcaaatcgtaccccaaaccgacacaggtggtcaggtagagaataccaaggcgcttgagagaactcgggtgaaggaactaggcaaaatggtgccgtaacttcgggagaaggcacgctgatatgtaggtgaagcgacttgctcgtggagctgaaatcagtcgaagataccagctggctgcaactgtttattaaaaacacagcactgtgcaaacacgaaagtggacgtatacggtgtgacgcctgcccggtgccggaaggttaattgatggggttagcggcaacgcgaagctcttgatcgaagccccggtaaacggcggccgtaactataacggtcctaaggtagcgaaattccttgtcgggtaagttccgacctgcacgaatggcgtaatgatggccaggctgtctccacccgagactcagtgaaattgaactcgctgtgaagatgcagtgtacccgcggcaagacggaaagaccccgtgaacctttactatagcttgacactgaacattgagccttgatgtgtaggataggtgggaggctttgaagtgtggacgccagtctgcatggagccgaccttgaaataccaccctttaatgtttgatgttctaacgttggcccgtaatccgggttgcggacagtgtctggtgggtagtttgactggggcggtctcctcctaaagagtaacggaggagcacgaaggttggctaatcctggtcggacatcaggaggttagtgcaatggcataagccagcttgactgcgagcgtgacggcgcgagcaggtgcgaaagcaggtcatagtgatccggtggttctgaatggaagggccatcgctcaacggataaaaggtactccggggataacaggctgataccgcccaagagttcatatcgacggcggtgtttggcacctcgatgtcggctcatcacatcctggggctgaagtaggtcccaagggtatggctgttcgccatttaaagtggtacgcgagctgggtttagaacgtcgtgagacagttcggtccctatctgccgtgggcgctggagaactgaggggggctgctcctagtacgagaggaccggagtggacgcatcactggtgttcgggttgtcatgccaatggcactgcccggtagctaaatgcggaagagataagtgctgaaagcatctaagcacgaaacttgccccgagatgagttctccctgactccttgagggtcctgaaggaacgttgaagacgacgacgttgataggccgggtgtgtaagcgcagcgatgcgttgagctaaccggtactaatgaaccgtgaggcttaaccttacaacgccgaagatgttttggcggatgagagaagattttcagcctgatacagattagattaaccggcgacaagcgggttaatgaaacagaatttgcctggcggccttagcgcggtggtcccacctgaccccatgccgaactcagaagtgaaacgccgtagcgccgatggtagtgtggggtctccccatgcgagagtagggaactgccaggcatcaaattaagcgaaaggcccagtcggaagactgggcttttttgcgttggtgcggaataaatgccggatgcgacgctggcgcgtttgctccagcctactcttgcttatccgtcctgcttttgcatccactccaccacaaaatcagccagcccctcaacatcattaatatccagtaacgcgacatcaagattaagcggcacatcactggctacagcaataacatgcctgtctatcactaattcttccggtcgatgtccggctccatcgcgaaacagcacaatctttgcgatctcttcatgcttaaacccttcgaccagaatcaaatccagctttgaggtatccattcgacttgcgagaaaatgtagatccagctcttcttcgtctggtgtttccgtcatcaaggcccatcgctgttggctggcaacgatggtttgcgccgcgccagccttgcgcagctcataactatctttgcccggtttatcaacatccatatcatggtgcgtatgcttaatcagccccggacggatccctctggcgcataatgccgggatcaattttttcagcagcgttgtttttccggtgccactccatgcagcaaaggcgagtaacggtatcatcgtttttcctgccatcgggcaagctcctctggcgtattcacgtttataaatgcctctttacgatcgctgaaatcaaccgcatgaccgccagccagacgcataaatgccataacccggcgttctcctgcttgcagatattccagtaataaaggctcaattgcgcggtttaccagagcaatagtcgggtgatcgcgttcaccgtcgtggacccacacgacaggcgcatctttgcgctgatgagtaagccgggcggctaaatcatggggaatgtaaggcgtatcgcacgggcaaaacaaaaaccactcacccgcttcctgctgcattactgaaagcattcctgccagaggaccagggtaatccgccagtgaatcttcaatcactttcagaccgcttacctgatagatttcctgatgacgattagcattaaccacgacgtgagaaagctgcgtcataagcgcgtcagcgacatactgccataatggtttgccgtttaattcaagcaatcctttatctacgccgcccattcgtctggctttaccgcccgccagcacaacgcctgttatcatcgtcatcagattcaccgatatcgcctcttttattgtgggattgaccctgctaacgtgtctgtctcaagagtaaggagcattactatgaaatgtaaacgtctgaatgaagttattgaactcctccagccagcctggcaaaaagagccagaccttaacctgctgcaatttttgcagaaactggcgaaagagtcaggttttgacggcgaactggcggatttgacggatgacattctgatctatcacctgaaaatgcgtgattccgcgaaagatgcggtgatcccgggtttgcagaaagattatgaagaagatttcaaaacggcgctattacgcgcacgtggcgtaattaaagagtaaaagcttgtaagcggcgcaaccaaaatcatcgtgaaatgatatccttcatcattcgtaatgttttccggatgatgggatgaacaacagcgcttttactttccagacactacacccggataccatcatggacgctctgtttgagcatgggattcgggtggattccggtcttaccccgcttaacagctatgaaaaccgtgtctatcaatttcaggacgaagatcgtcgacgttttgtcgtcaaattttatcgccctgaacgttggacagccgatcaaatcctcgaagaacatcaatttgcgttgcagctggttaacgatgaagttccggtcgcagcacctgtggcctttaatggtcagactttattgaaccatcagggattttatttcgctgtttttccaagcgtcggtggtcgccagttcgaagctgataatatcgatcagatggaagcggttgggcgttatttagggcgtatgcaccagacggggcgcaaacagctttttatccatcgcccgaccatcggtttgaatgaatatctcattgagccacgcaagctgtttgaggacgctacactgataccttccgggttgaaagcggcattcctgaaagcgacagatgagctgattgccgccgttacagcacactggcgggaagatttcaccgttctgcggctacatggagactgccacgccgggaatattctctggcgcgatggtccaatgtttgttgatctggatgatgcacgtaatggtccagccgttcaggatttgtggatgttgctcaatggtgataaagccgagcagcggatgcaactggaaactattattgaggcttatgaagaatttagcgagttcgacaccgctgaaatcggactgattgaacctttacgcgccatgcgtttggtttattatcttgcctggctaatgcggcgttgggctgatcccgcgttcccgaaaaatttcccgtggttaaccggggaagattactggctacgacagacggcgacttttatagaacaggcaaaagttctacaagaaccccctttgcaattaacacctatgtattaatcggagagagtagatcatgaaaaagatttggctggcgctggctggtttagttttagcgtttagcgcatcggcggcgcagtatgaagatggtaaacagtacactaccctggaaaaaccagttgctggcgcgccgcaagtgctggagtttttctctttcttctgcccgcactgctatcagtttgaagaagttctgcatatttctgataacgtgaagaaaaaactgccggaaggcgtgaagatgactaaataccacgtcaacttcatggggggtgacctgggcaaagagctgactcaggcatgggctgtggcgatggcgctgggcgtggaagacaaagtcacagttccgctgtttgaaggcgtacaaaaaacccagaccattcgttcagcatctgatatccgcgatgtatttatcaacgcaggtattaaaggtgaagagtacgacgcggcgtggaacagcttcgtggtgaaatctctggtcgctcagcaggaaaaagctgcagctgacgtgcaattgcgtggtgttccggcgatgtttgttaacggtaaatatcagctgaatccgcagggtatggataccagcaatatggatgtttttgttcagcagtatgctgatactgtgaaatatctgtccgagaaaaaataattcaatgtaaattacataaagcccgtgaatattcacgggctttttttattatttaataaatataaatacattctgataatgcgtcctgctgctggacattatttcagcataagtggatattcaaagttttgctgttttatcagggaatatttatatgatacgtaagtcagctacaggtgccattgttgcgttagccgtaatctggggtggtggcacatggtacacaggtacgcaaattcagcctggtgtcgaaaagtttattaaaggttttaacgatgctaaaaagaaaggtgaacatgcctacgatatgacgttaagttataaaaattttgacaaaggcttttttaattcccgttttcaaatgcaaatgacatttgataacggtgcacccgatctcaatatcaagccaggccagaaaattgtatttgatgtggatgttgagcacggtccgttgcccatcacaatgttaatgcatggtaatgtcatcccagcactggcagcggcaaaagtgaacttagtgaataatgagctgacacaaccgctatttatcgccgcgaaaaataaatcgcccgtggaagcgacattgcgattcgcgtttggtggctcattctccacgacattagatgttgcccctgcagagtatggaaagttttcttttggtgaaggccagtttacttttaatggtgatgatagttcattgtctaacctggatattgaaggcaaagtcgaagatattgttctgcaattttcaccaatgaacaaagtaacggcgaaaagttttaccattgattctctgacacgattagaagaaaagaaatttccggttggtgaaagcgagtcgaaatttaatcaggttaatattatcaaccagggggaagtcgttgcccaaatcgatgctttcgttgcaaaaaccaggctggatcgcgttaaagacaaagattatatcaatgtcaatctgacctacgaacttgataagttaacaaaagggaatcagcaactcggtagtggtgagtggtcattgattgctgagtctattgatccctcagcggtgcgccaatttatcatccagtataacattgcgatgcagaagcagcttgctgcacaccctgagttagcaaacgatgaagttgctctgcaagaagtgaatgctgcattgttcaaagagtatttaccgttattacaaaaaagtgagccgaccattaaacaaccggtaagatggaagaacgcactcggcgaactaaatgccaatctggatatcagtattgccgacccagccaaatcttcatcatccacaaacaaagatattaaatcgctcaattttgatgtgaagttaccgcttaatgtcgccacagaaaccgcaaaacagcttaatttatctgaagggatggatgcggaaaaagcgcaaaagcgggctgataaacaaatcagcgggatgatgacattaggtcagatgttgcagttaatcacgattgacaacaataccgcctcgctgcaactgcgttatacaccgggtaaagttgtttttaacggacaggagatgagcgaagaagaatttatgtctcgtgccggacgttttgctcattaaaatactcactcgcctctgctcattcagaggcgagtaaaacttacttttcctgccgctgtgatgacatcaacgatgtcagaagccggtctttttcctgccacaatgagttcagccattgctgaaaatggcgcttaaagcttttgtcattgatgtagtcgccatgtaactcatcggcaataggctgtaaatccacatgtacgacaattcgcgtcagtttaccgcttaacatatcgaagaacggctgacggttattgtccggataacacagcgtaacattaagcagtttatcgaattgtttacccagtacatttagcgccattgcaatgcctgccgcctttggtggcaacaagttttgaaaagtggagtgggtttgctgatgtttttcttgcgtgaaacgggagccttcaacgaaattgacaatagtggtgggatgcaggcgaaacttttcacaagaacgccgagtggtttcaacatctttaccacgtcgctccggatgacgtaataaataagcgcgggaataacgcttcataaacggcatatccagcgcccagcacgccaggccaagaaaaggcacccaggccagctgctgcttgaggaaatatttattcatcggaatgtgcttacgaaacagcacgcacagtacgacaatatctgcccaactacggtggttacaaataagtagataccagttcttcttacttaacccttccagcccgtgaacttcccattgcaggtgtgggttcagatgcagtaataccgccagaccttcacaccagcaatacatcataaaatcacaaaaacgcgaaacctttcgccaaatgactggcacaggtagcaatagttttacaatcccggcaatgatgatcgggacggaacaaaaaatagtgaccaaaatggtcaatacgatactcagcaaaagggttatcgcagcgagtattctcgtcataatgaatttattcaaaaggttagccatagacagtgcgctaaagaagcgcaaggcgcagattttagcagaaaacgacccaaataacggatgatccttaaggagaaaaataattcatatctatccacattagaaaaaatcccattatctcaattattagggatggctttatttttaactgcatgaaaaacaaagataaacaccatgctgtaaaaagcatgataataaattaaaagcgatgtaaataatttatgcacaaagttatccacatgacgatttgcgagcgatccagaagatctacaaaagattttcacgaaaagcggtgaaaaactcatgttttcatcctgtctgtggcatcctttacccataatctgataaacaggcacggacattatggttcagatcccccaaaatccacttatccttgtagatggttcatcttatctttatcgcgcatatcacgcgtttcccccgctgactaacagcgcaggcgagccgaccggtgcgatgtatggtgtcctcaacatgctgcgcagtctgatcatgcaatataaaccgacgcatgcagcggtggtctttgacgccaagggaaaaacctttcgtgatgaactgtttgaacattacaaatcacatcgcccgccaatgccggacgatctgcgagcacaaatcgaacctctgcacgcgatggttaaagcgatgggactgccgctgctggcggtttctggcgtagaagcggacgacgttattggtactctggcgcgcgaagccgaaaaagccgggcgtccggtgctgatcagcactggcgataaagatatggcgcagctggtgacaccaaatatcacgcttatcaacaccatgacgaataccatcctcggaccggaagaggtggtgaataagtacggcgtgccgccagaactgatcatcgatttcttggcgctgatgggtgactcctctgataacattcctggcgtaccgggcgtcggtgaaaaaaccgcgcaggcattgctgcaaggtcttggcgggctggatacgctgtatgccgagccagaaaaaattgctgggttgagcttccgtggcgcgaaaacaatggcagcgaagctcgagcaaaacaaagaagttgcttatctctcataccagctggcgacgattaaaaccgacgttgaactggagctgacctgtgaacaactggaagtgcagccaccggcggcggaagagttgttagggctgttcaaaaagtatgagttcaaacgctggactgctgatgtcgaagcgggaaaatggctacaggctaaaggagcgaaacccgcagccaggccgcaggaaaccagtgttgcagacgaagcgccagaagtgacggcaacggtgatttcttatgacaactacgtcaccatccttgatgaagaaacactgaaagcgtggattgcgaagctggaaaaagcgccggtatttgcatttgataccgaaaccgacagccttgataacatctctgctaacctggtcgggctttcttttgctatcgagccaggcgtagcggcatatattccggttgctcatgattatcttgatgcgcccgatcaaatctctcgcgagcgtgcactcgagctgctaaaaccgctgctggaagatgaaaaggcgctgaaggtcgggcaaaacctgaaatacgatcgcggtattctggcgaactacggcattgaactacgtgggattgcgtttgataccatgctggagtcctacattctcaatagcgttgccggacgtcacgatatggacagcctcgcggaacgttggttgaagcacaaaaccatcacttttgaagagattgcgggtaaaggcaaaaatcaactgacctttaaccagattgccctcgaagaagccggacgttacgccgccgaagatgcagatgtcaccttgcagttgcatctgaaaatgtggccggatctgcaaaaacacaaagggccgttgaacgtcttcgagaatatcgaaatgccgctggtgccggtgctttcacgcattgaacgtaacggtgtgaagatcgatccgaaagtgctgcacaatcactctgaagagctcaccttgcgtctggctgagctggaaaagaaagcgcatgaaattgcaggtgaagaatttaacctttcttccaccaagcagttacaaaccattctgtttgaaaaacagggcattaaaccgctgaagaaaacgccgggtggcgcgccgtcaacgtcggaagaggtactggaagaactggcgctggactatccgttgccaaaagtgattctggagtatcgtggtctggcgaagctgaaatcgacctacaccgacaagctgccgttgatgatcaacccgaaaaccgggcgtgtacatacctcttatcaccaggcagtaaccgcaacgggacgtttatcgtcaaccgatcctaacctgcaaaacattccggtgcgtaacgaagaaggtcgccgtatccgccaggcgtttattgcgccagaggattatgtgattgtctcagcggactactcgcagattgaactgcgcattatggcgcatctctcgcgtgacaaaggcttgctgaccgcattcgcggaaggaaaagatatccaccgtgcaacggcggcagaagtgtttggtttgccactggaaaccgtcaccagcgagcaacgtcgtagtgcaaaagcgatcaactttggtctgatttatggcatgagtgctttcggtctggcgcggcaattgaacattccgcgtaaagaagcgcagaagtacatggacctttacttcgaacgctaccctggcgtgctggagtatatggaacgcacccgtgctcaggcgaaagagcagggctacgttgaaacgctggacggacgccgtctgtatctgccggatatcaaatccagcaatggtgctcgtcgtgcagcggctgaacgtgcagccattaacgcgccaatgcagggaaccgccgccgacattatcaaacgggcgatgattgccgttgatgcgtggctacaggctgagcaaccgcgcgttcgtatgatcatgcaggtacacgatgaactggtatttgaagtccataaagatgatgtcgatgccgtcgcgaagcagattcatcaactgatggaaaactgtacccgtctggatgtgccgttgctggtggaagtggggagtggcgaaaactgggatcaggcgcactaagattcgcctgaacatgcccttttttcgtaagtaagcaacataagctgtcacgttttgtgatggctattagaaattcctatgcaacaactgaaaaaaaattacaaaaaatgctttctgaactgaacaaaaaagagtaaagttagtcgcgtagggtacagaggtaagatgttctatctttcagaccttttacttcacgtaatcggatttggctgaatattttagccgccccagtcagtaatgactggggcgttttttattgggcgaaagaaaagatccgtaatgcctgatacgccatgtttatcaggccaacggtagaattgtaatctattgaatttacgggccggatacgccacatccggcacaagcattaaggtaagaaaattattcgccgtcctgcgtttcttctacaggctgcatctcgctaaaccaggtatccagtttctgccgcagcttgtccacgccttgtttcttcagcgaagaaaacgtttcaacctgcacatcaccgttaaacgccagcaccgcttcacgcaccatattcaattgcgctttacgtgcgccgcttgccagtttgtccgctttggtcagcagtaccagcacggcgatattgctgtctaccgcccactcaatcatctgctgatccaaatctttcagcggatggcgaatatccattagcaccaccagaccttgcaggctctgacgtttttcgaggtactcgccgagcgcgcgctgccatttgcgcttcatctcttccgggacttccgcataaccgtatccaggcaagtcaaccagacgcttgccgtcagccacttcaaacaggttgataagctgggtgcgccctggggtttttgaggtacgagccaggcttttctggttagtcagcgtgttcagcgcgctggatttacctgcgttggaacggcctgcaaaagccacttcaattccggtatcggaaggtaggtggcgaatatcaggcgcactcatcacaaaatgcgtctgttgataattcaaattagtcaaagcggtcgtctccatcagtcaaagctttgcggcgattatacctgaaccataataaaaggcggatttttcggcgtgagcgttgtaagtaaaagccatatgctttgtgagacattgccgatagtctttatgcgaaatagcagagaaaattctgcgacgcatgtcaaataagctatataaatcagtgaattgcttttatataaaactctgaaaatgtgcaaatactgatggcggttgattgtttatttaaagcaaaggcgtaaagtagcacccatagagcgaggacgctaacaggaacaatgactcaggatgagggtcaggagcgccaggaggcgaagacagaggattgtcaggaagataaacgtccggagacgtaattaaatggaaatggaatcaacacggattgttccggctaatggaaaaacagggtgtgttggcggcctgcaaggattgtaagacccgttaagggttatgagtcaggaaaaaaggcgacagagtaatctgtcgccttttttctttgcttgctttctgttagattccgccgcaaatctatactgaataaaacggctaaaagacgaaccattatgaaaccatcatcttcaaactcacgcagcaaaggtcatgcaaaagcgcgtagaaaaacacgcgaggagctggatcaggaagctcgtgaccgtaagcgtcagaaaaaacgtcgtggtcatgcgccgggcagccgcgcagcgggtggtaacaccacgtcaggcagcaaaggccagaacgcaccaaaagatccacgtattggcagtaaaacccctattccattgggcgtggctgaaaaagtcaccaaacagcacaaaccgaagagtgagaaacctatgctttcaccgcaggcggagttggagttactggaaacggatgagcgtctggatgcgctgctggaacgtctggaagcaggcgaaactctgagcgccgaagagcaatcctgggtggatgccaaactggatcgtattgatgagttgatgcagaaacttggcctctcttatgacgatgacgaagaagaggaagaagacgagaagcaagaagacatgatgcgtctgctgcggggcaactaacggattgccgccgtgggccttcccgttctgctgataacccttccggttatatgttatctggtgtggttattcgttaaactacagcggttgtcgcggcgacaaaagtggctgcgcaaccggctgatgacccgaaacgggcatccgccggtacgccgtagccgccagagacgccatcggaaggagtgagcatgtctgtacagcaaatcgactgggatctggccctgatccagaaatataactattccgggccacgatacacctcgtacccgaccgcgctggagttttcagaagacttcggcgaacaggcgtttttacaagccgtggcgcgctatcctgagcgtccattatctctctacgtacatattccgttctgccataagctttgttacttctgcggttgcaataagattgttactcgccagcagcacaaggccgatcagtatctggacgcgctggagcaagaaatcgtccatcgtgcaccgctgttcgccgggcgtcacgtcagccaattgcactggggcggcggaacgccgacgtatctgaataaagcgcaaatcagccgtctgatgaagctgctgcgcgaaaacttccagttcaatgccgatgcggagatctcgatcgaagtcgatccgcgggaaatcgaactggatgtactcgatcatttacgcgccgaaggctttaatcggctgagcatgggcgtgcaggacttcaacaaagaagtgcaacgtctggttaaccgcgagcaggatgaagagttcatctttgcactgcttaaccatgcgcgtgagattggctttacctccaccaacatcgacctgatttacggcctgccgaaacagacgccggagagtttcgcctttaccctgaaacgcgtggcggagctgaaccccgatcgtctgagcgtctttaactacgcgcatttgccgaccatttttgctgctcagcgcaaaatcaaagatgctgacctgccgagtccgcagcaaaaactcgatatcctgcaggaaaccatcgccttcctgacacaatcgggctatcagtttatcggtatggatcactttgcccgtccggatgacgagctggcggtggcccagcgtgaaggcgtgctgcatcgtaacttccagggctacaccactcagggcgataccgatctgctggggatgggcgtttccgccatcagcatgattggcgactgctacgcgcagaaccagaaagagttgaagcagtactatcagcaagtggatgaacaaggcaatgcgctgtggcgtggtattgcgctaacgcgtgatgactgtattcgccgcgatgtgattaagtcgctcatctgcaacttccgtctggattactcccctattgagcaacagtgggatttgctcttcgctgattactttgcggaagatctcaagttgctcgccccgttagcaaaagatgggctggtggatgtggatgagaagggaatacaggtgacggcgaaaggtcgcttgctgatccgcaacatttgcatgtgctttgatacctatctgcgccagaaagcgcggatgcagcagttctctcgggtgatttaaattgtgaatggcgcttcgtttacaaagtagaaaacgaaagcgccatcaatgtgctgagaacaagattgcctgatgcgctacgcttatcaggcctgcaaaatctgttgaaattattgcttttgtaggccggataaggcgtttacgccgcatccggcaatcaacgcctgatgcgacgctggttgcgtcttatcaggcctacgactttctccgcatccggcgtaaacaacgagcttcagctaaacagccctatcatcgcggcacacagcacggcagcaacagcagtttgcggtgtgtggctgtcaactgcgccactcgataccagattaattattgattccagcataatgactctccccgttttccgggcaagatcatactgaacttatcggaacagtaaagcgcaaaataccagcaatttgcgctcaataatcaatctttacacacaagccgtgaatcactccatccccagctcttttaacttacgcgtcagggtgttgcgaccccagccaagtagccgcgccgcttcctgtttatgcccctgcgtatgtcgcagcgcggtggtcagtaacgtccgttccagctctggctgtgcttcggaaagcaggttttgatgaccggaacgcagcgctctgtctgcccactgtgctaacagcgttgcccaactgtccggctgcatgtgtgaagtgctttccggtacgtttgattcaaacagttcgccaggcaaatcctgaatcaacacttcctgcccggcggccatcaccgttagccagcgacaggtgttttccagctggcgcacgttgcctggccacgccagacgcgtcagcgcggcttcggtttccggatgcagcaacttcgcttctacgcccagctctcgcgcggcaacctgtaaaaaatggcgtgccagacggggaatatcttcccgacgttcgcgcagtggcggcagatgaacgcggatgacgttcaggcggtggaacagatcctcacggaacttgccttccagcacccgctgttcaagattctggtgagtggcagcgataatccgcacatctactttcaccggcgcatagccgccaacgcgataaaactgaccgtctgccagcacgcgcagcaaacgcgtttgcacatccagcggcatatcgccaatttcatcgagaaataatgtaccgccatcagcctgttcaaaacgcccctgacgaatggtattcgcgccggtaaatgcgcctttctcgtgaccaaacagttcggattcgatcaaatccttcgggatagccgccatattgagcgcgataaacggcgctttggctcgcggactgtggcgatgcagggcatgagcgaccagttctttaccggtgccggattcgccgttaatcagcacgctaatagaagaacgcgaaagccgaccgataatccggaacacgtcctgcatggctggcgcttcaccgatgatatcggtcgttgggccgttaagctgaacattacgcggctgctgctgttcctggtaatgactgatggcgcgctcaaccagcgccacggcttcgtcgatatcaaacggtttgggcagataatcaaatgccccttgttgataggcgctgacggcagcatccagatcggaatgtgcggtcataatgatgaccggaagcatcggatggcgctgtttaatctgcttgagcagcgccagcccgtccattcccggcatacggatatctgaaagcagcacatccggcgttttgctcgccagcgcctccagtacttccgcgccgttctcaaatgtcgtacaggttaaacccgctccagcgagcgcacgttcaagcacccaacggatggaactatcgtcatcgactacccagactatccctcgttgcataaacgtcacctttatttcctgataggcaggtaaaccgagaactcggtatgacctggccaactggtaaattcaattttgcctgaatgctgatcaatcaaattacgggcgatggataagccaagcccggtgccaccttcgcggccgctgaccatcgggtaaaacagcgtatcctgcaaatgaggcggaatgcccggcccgttatcttccacatcaatccgcgccgccagccgatagcgctcgccgtgtaaggtcagttgaaacgctgtgcgggtacgtagaatgatttcaccaccctccggccccagcgcctgtagcgcattgcgcacaatattcagcaagacctgttcaatttgatccgggtcgtgcgccagttccggcaggctggggtcgtaatcccgaatcaaccgcacgttgttcggcagttccatcgacaccagcgtcaccacgcgttcagccactttgtgaatactttcggtaatgcgcgtaccgggcagctgcggccccaacagacggtcgaccagatttcgcagccggtccgcctgttcgataatcactttggtatattcgagtagtgacgggtcaggtaatgctttgctgagcagctgcgccgcgccacgtaaaccgccaagcggatttttaatctcatgtgccaggccgcgcactaaatcacgggcagcaacctgctgggcgtgctgtagctgttcctgacttaagcggcgctggttatccatcggtgccatctccagcaggatcatgccgtccggcatacgctgagccgtcacagaaaggatatgcgagcgcccgtcgatgaccagcgtcacttcgttatcggtaaaaccttgccccgcctccagactttcttgcatcagctcgatatttaatgagaagtagctcaacagttccggtaacggcgtaccaaacaatttgcgggagctttgggcgagcagttgttgcgcggcggggttggcgtaatggatcgccagattgtcatcgattaacaaaatactgttaatcagcgagttgaggatctgcccagcatcgggctgcgtgcctgttgccataaagcagtctcctgaacaggttgcaccattttagtgcattatagctttttacggataaaaagcgcgaagcatcagagaattgacggagaaaaaagcccatgcagagatgggctgaaagtttccacggcaactaaatcccggcgttgttgcgccgggtagtacaacttcaactattagacgctgtagtacagctcaaactctaccggatgcggagtcatacgcacgcggtcatcttcttcgcgacgcagagcgatgtacgcatcgatcgcttcatccgtgaacacgccaccagctttcaggaactcgcggtccagatccagttcgttcagtgcttcttccagagagcctgcaacctgtgggatctctttcgcttcttctggcggcaggtcatacaggtttttgtccatggcttcgcccggatggatcttgttcttgatgccatcaagaccggccatcagcagggcagcaaagcacaggtacgggttagccgccgggtccgggaaacgtacttcgatacgacgtgctttcggagaagaaaccaccggaatacggatagacgcagaacggttacgcgcagagtaagccagcattaccggtgcttcgtagcccgggaccagacgcttgtaagagttggtggtcgggtttgccagggcgttaatcgctttagcgtgtttgattacgccgccaatgtagtacagtgcctgttcagacagacctgcgtatttgtcgccagcaaacaggttgacgccgtttttagacagcgacatgtggcagtgcataccggaaccgttatcaccgaacatcggttttggcataaaggtcgcggtcttaccgaaacggtgcgccacgttgtgcacgacatatttgtagatctgaatttcgtcagcttttttggtcatggtattgaagcgggtagccacttcgttctgacctgcggtagcgacttcgtggtgatgagcttcaactaccagacccatctgttccatcaccagacacatttcagaacgaatatcctgagctgagtctaccggcggaaccgggaagtaaccgcctttcactgccggacggtgacctttgttaccaccttcatattgggtggaggagttccatgcaccttcgatatcgtcgatagcaacgtgggaaccggagatagacgatccgaaacggatgtcatcgaacaggaagaattcaggttctggcccgaacagtacggtgtcggcaatgccagtagaacgcaggtaatcttcagcgcgcttcgcaatagagcgcgggtcacggtcatagccttgcagggtgccaggttcaaggatgtcgcaacggataatcagggtagaatcggcgaagaacgggtcaatcactgcggtggatgcgtctggcatcagcaccatatcggattcgttaatgcctttccagccgccaatcgaggagccgtcaaacattttgccttcttcgaagaattcggcattcacctgatgagcagggatagtgacgtgctgttctttacctttggtatcggtgaagcgcaaatcaacaaacttcacttcgtgctcgttcagcatcgtcagtacgtgttcagcggacatactttaactctcctggattggtcattgtcgtcgtggtaacgaaatctgcaattaaatgggccgtgtcgccgtaaaaaagataaagcgaaatctgtgccaacttttaaattgcccctaaaaggcgttatcatgcttaacatcgtgcaaaagggctgcaccatgatgtgaatgttgcaccaatatagtgcttcaatgggaacattaagcaccatattggtgcaatgacctttggataaccctttttatgctccgtgaaagcgatcacaaagggactctgcaatacttgtttgcggaggatgtttgtgatcctgttttgtagtgcgattaatccgtgtacaataacgcgctatttctaatgcctgaggcaaagttgtgatcgaaaaattgcgtaatatcgccatcatcgcgcacgtagaccatggtaaaaccaccctggtagacaagctgctccaacaatccggtacgttcgactctcgtgccgaaacccaagagcgcgtgatggactccaacgatttggagaaagagcgtgggattaccatcctcgcgaaaaacaccgctatcaaatggaatgattaccgtatcaacatcgttgataccccggggcacgccgacttcggtggtgaagttgaacgtgtaatgtccatggtagactcagtgctgctggtggttgacgcatttgacggcccgatgccgcaaacgcgcttcgtaaccaaaaaagcgtttgcttacggcctgaagccgattgttgttatcaacaaagttgaccgccctggcgcgcgtcctgattgggttgtggatcaggtattcgatctgttcgttaacctcgacgcgaccgacgagcagctggacttcccgatcgtttacgcttctgcgctgaacggtatcgcgggtctggaccacgaagatatggcggaagacatgaccccgctgtaccaggcgattgttgaccacgttcctgcgccggacgttgaccttgacggtccgttccagatgcagatttctcagctcgattacaacagctatgttggcgttatcggcattggccgcatcaagcgcggtaaagtgaagccgaaccagcaggttactatcatcgatagcgaaggcaaaacccgcaacgcgaaagtcggtaaagtgctgggccacctcggtctggaacgtatcgaaaccgatctggcggaagctggcgatatcgtggcgatcacgggccttggcgaactgaacatttctgacaccgtttgcgacacgcaaaacgttgaagcgctgccggcactctccgttgatgagccgaccgtttctatgttcttctgcgttaacacctcgccgttctgcggtaaagaaggtaagttcgtaacgtctcgtcagatcctggatcgtctgaacaaagaactggtacacaacgttgcgctgcgcgtagaagaaaccgaagacgccgatgcgttccgcgtttctggtcgtggcgaactgcacctgtctgttctgatcgaaaacatgcgtcgtgaaggtttcgaactggcggtatcccgtccgaaagtaatcttccgtgaaatcgacggtcgtaaacaagagccgtatgaaaacgtgacgctggacgttgaagaacagcatcagggttctgtgatgcaggcgctgggcgaacgtaaaggcgacctgaaaaacatgaatccagacggtaaaggccgcgtacgtctcgactacgtgatcccaagccgtggtctgattggcttccgttctgagttcatgaccatgacttccggtactggtctgctgtactccaccttcagccactacgacgacgtacgtccgggcgaagtgggtcagcgtcagaacggtgtactgatctctaacggtcagggtaaagcggtcgcgttcgcgctgttcggtctgcaggaccgtggtaagctgttcctcggtcacggtgcagaagtttacgaaggtcagattatcggtattcatagccgctctaacgacctgactgtaaactgcctgaccggtaagaaactgaccaacatgcgtgcttccggtactgacgaagccgttgttctggttccgcctatccgcatgactctggaacaagctctggagttcatcgatgatgacgaactggtagaagtgactccgacctctatccgtattcgtaaacgtcacctgacggaaaacgatcgtcgtcgcgccaaccgcgcaccgaaagacgattaatttcgttttttagtcataaaaaaacctgccagcgatggcaggtttttttttgcctgtcgtgagcgcacaccaatgcgagtatctcccttataagtctgtgattacgtcaatagagagctttgtcacaattatctgcaaagtcatacgccgttaattgctttcttttttggcgtaagcgtaagatgcctcatctggtttaaaccaaaaggattaaacaatggcggagaatcaatccaccgtagaaaatgcaaaagagaaactggatcggtggttgaaagatggcatcaccacgccgggtggaaaactcccttcagaaagagagctgggagaactgctgggcattaaacgtatgacgctgcgccaggcgttgttgaacctcgaggcagaatccaaaatcttccgtaaggatcgtaaagggtggttcgtgacccagccgcgatttaattacagtccagagctgtcggcgagctttcagcgggctgcaattgagcaagggcgggagccttcctgggggtttaccgagaaaagccgtaccagagatattcccgagacgctcgtgccactgattacagtgacaccatcaactgaactctatcgcatcaccggctggggagcgctggaaggacataaagttttctatcacgaaacatatattaatcctgaagttgccccgggttttattgaacaacttgaaaaccactcattttctgcagtctgggaaaagtgctaccaaaaagagacggtagtaaaaaaattgattttcaaacccgtcagaatgccgggcgatatcagcaagtatcttggcggttctgcgggtatgccagcgatcttaattgaaaagcatcgcgccgaccagcagggcaatattgtccagatagatattgaatattggcgatttgaggccgtagacctcatcattaatctgtaggtgttttatggtgacaataaataacgcaagaaagattctacaacgtgtcgacactcttcctctttatttacatgcttatgcctttcatttaaatatgcgactggaaagagtgttgcctgctgatttacttgatatcgcaagtgaaaataatctacgtggcgtcaaaatccatgttctggatggagagcgtttttctcttggtaatatggacgataaagaactctctgcctttggggataaagcccgccgtctgaaccttgatattcatattgaaaccagcgcctcagataaaaaatctattgacgaagccgtcgccatcgcgttgaaaactggggcatcctccgtacgtttttatccgcgttatgaaggtaatttgcgcgacgtattatcgattatcgctaacgacattgcctatgtacgagaaacgtatcaggacagcggcctgacttttacgatcgagcagcatgaagatttaaaaagtcatgagctggtgtcgctggtcaaagaaagtgagatggagtctctttccttactgtttgattttgcgaacatgatcaatgcaaatgagcatcccatcgacgctttaaaaacgatggcaccgcatattactcaggtccatatcaaagatgctttgatcgttaaagaacagggtggcctgggacataaagcctgtatttcaggtcagggggatatgcccttcaaagcgttattaacgcaccttatctgcctgggtgatgatgagccgcaggtgacggcatatggcctggaagaagaggttgattattatgcaccggcgttccgctttgaagacgaagatgataatccgtggatcccttatcgccagatgagtgaaacaccattgccagaaaatcatttactggatgcgcggttacgtaaagaaaaagaagatgcaattaatcagataaatcatgtgcgtaacgtactacaacaaatcaaacaagaggcaaaccatcttctgaacaactaataagttttaactcatacgcagttaataaaaccattccatatgaatggtcggtatcttattgcctttaaaacagtgattttaaaaatcgcttagggaatgttatgctcacgaaaaagaaatgggcgttatttagcctattaacactgtgtggcggtacaatttataaattaccgtcgctgaaagatgcgttttatatcccgatgcaggaatatttccatttgaccaatggtcaaattggtaatgctatgtcggtaaactcatttgtcaccacagtgggcttttttctgtctatttattttgccgataaactaccgcgcagatacaccatgtcattctcactcattgcgacaggattactgggtgtttatttgacgacaatgccggggtattggggcatcctctttgtctgggcgctatttggcgttacttgcgacatgatgaactggccggtcttgctcaagtcggtaagtcgattgggcaatagcgaacaacaaggtcggttgtttggcttcttcgaaacagggcgtggcattgtcgataccgtggtggcattttctgcgttggcagtatttacctggtttggcagtggcttattgggttttaaagcaggcatctggttctattcccttattgtgattgccgtaggcattatcattttctttgtcctgaatgacaaagaagaggcaccgtccgttgaggtgaaaaaagaagacggagcatcgcaaaacaccagtatgacctcggtgctgagagacaaaaccatctggcttatcgctttcaacgtcttcttcgtttacgcggtttactgtggcctaacattcttcattccattcctgaaaaacatctatctattgcccgttgctctggtgggggcttacggcatcattaaccaatactgtctgaaaatgattggaggaccgattggtggcatgatttcagataagatcctgaaatcgccgagtaaatatctatgctacacctttatcatcagtaccgctgcgctcgtactgttgattatgctgccgcacgaaagtatgccggtctatttagggatggcatgtacgctgggctttggcgctatagtcttcacacagcgagccgtattttttgcacctatcggcgaagcaaaaattgctgaaaataaaacaggcgcggcgatggcgttgggtagctttattggttacgccccggcgatgttctgcttcagtctgtatggctacattctggatttaaatccggggattattggctacaaaatcgtgtttggcattatggcctgcttcgcattctgtggtgcggtggtttccgtaatgctggttaagcgtattagccaacgtaagaaagagatgttggcggctgaagcttaattagtggccggatgtgcttaatccggccaacgaaaaccgtatcaaccgaagtttcaatttcaggatacttcttgctcggcaaccaccagttcaacattctcttcacttaacaactggcagaaagaattgggaggcggggcatcagtaaaaaaagccctgacattccgtgcattgccaattgaaacggcagcagacgcggtaaacttcgtatgatcggccactaacaatgtattccgcgcatgtttaatcatcgttctcgcgactaacgcttcattgacatcaaattccagtagggtgccgtcatgttcaatggcacctatactggtgattaaataatctgcgcggaagccttcaataaaatccacggctcctgggccgataatcccaccgttatgagcgcgtaaagtgcctcccggcaccatcacttcaatatcctgattcttataaagaatctgtgccacacgcaggctattagtgataatgcgtaaatcacgccggttgagtaatgccctggcaacggcttctacggttgtaccgatggtgataaagacggtacagcgttcgggaaggtaatcggcgactgcctcagcgatcgcccgtttctcggcggtgagcgaaagttcccgttgctcaaaagcggtattcatgacgctggagacgcgcccggcccctccatgatgacgggtgatcaagccctgctcactgagttttcggatatcccggcgcacggtttgcgttgaaacatccagcagttgtgccagttcttcaatattcatataaccgcgttctgcgattagatgaacgagttggtcatggcgtggattacctgtcacttcgatgatactcatgaatactcccttgcccctcctcggtagatgtttaccattttacgcataaagtgacaaaaatgattcggtttgctcacgattaggaatgccggcccgaccgccaggctgggtacatttcatcgcggcaaccgcactggcaaaacgaatagcctcttttgttggcattttttctgccaacgctaccgcgagtgcgccgtgaaaaacatcgcctgctccagtggtatcaaccacattgacagaaaatgcctcctgttgacacaaatgaccatcttcaatccacaacgatccttcagaacccagcgtaacatacactttacctgctgtttgtgtcgttgcctggaacaaaccttcttcaggtgactgcaggccagtcatgcgtttcagccctggtgttgagaacacggcgtgatcggcaagcgcgacaagtggagaaatatcctgcggtgtcatatcggcgtctaaaagcgttgtcacacccgcaaggcgcgctagcgagaatgctttttcagtaccgctatgccagcgaacatcggccagaatcagatcataacgagagaaatcgatcgcttctaaccattcggcatcagtaccgagatcaggacttggataattaacgataatccgttcgccatgctgatcaacgaggatcgctgattgcgacgaacgggcgttaggatatcggcggcaaaatgcggtattgacgccccaaccctcaagttctgcaagtaaggtatttccacaactgtcatcgccgatgcgaccgatgaaatcaacctccacgccaagctttgcgattgcaacagcggctgttgctgccgggccgccaccaatctcaagataatgatttgcctgatatttcccgccaccctccggcagagtgggcaaagaataaattctgtcctgaactgtgatacccacgcatgcaattctggtcatatttgtcttgtcctgtttaattttgtcgtctttggtcaatttaaatgacacaaatgatcaaattagtgatgcgtgtcgtgtttttgaacataaattacaaatatgctcaaaaacagacgaaaacgaattttcaattgtcattattttgtcaatgtcagacaggagagtattcatggcaaccattgcatttctcgggctggggcagatgggtagcccaatggctaacaatctattgcaaaaagggcattcattacaggtatttgatgtcaatacacaggccgtcgatgcgctagttacgcagggggccactgcggcacaaaccccagcggaagcggcagcaagcgctgaatttatcatcactatgcttcccaatggggacattgttcgacaggtgctgttgggggaaaaaggcgtctgtgaaactgtttcatctgacgcgttagtgattgatatgtcgactattcatcccttacagaccgatgcattaatacgggaattacaagaaaaaggcatcaatatgatggacgcccccgtgggcagaacgtcagtgaatgcgattgatggcacattgctgattttagcgggcggcactgatgagcagattgcgcgtgcacgcccgattctcatgtgcatgggtaatgagctggtcgaggctggtggcccaggaatggggatccgcgtgaagctaattaacaactatatgagcattgcgcttaatgcgctgtcctccgaagccgctgtgttatgtgagtcactgggattaaatcttgatgtcgcaattaaggtgatgagtggtacggcagcagggaaaggacattttacgaccacctggcctggcaaagtgctgaaaggcgatctttctcccgccttcatggtggacctggcattgaaagatctgcgtattgcagttgacgtcgctcggaaaacgggggcgccgctcaatatggggattgcagcagaaagttattacgccgcagcaagtcaagacggcaaagggcggcaggactggagcgccctgctaaatcaggttcgccagcaggctggtctttaattttatctattaacaggagtttctatgtcatcccacttcaccccatttacgctgaaagatatctcccgcccaggtggtggattcgccatgttagctgtcgatcagcgtgaggccatgcgcctgatgtttgcggcagcagggcagccaaaacccatcgccgacagtgtactcaccgattttaaagttgccgcgacccgaatcctttctccttatgcttctgccgttctggcggataaacaattttgtcttgaacaaatagtcgagcagggcgctgtggctaattcttgcggcctgattgtcgctgccgatctttttatcccaggtaatggcatcccggttgatagcgttgaaatagatatgtccgtcgacccgcataaagcccgtgaaatgggggctaaggcaatgaaattacttgtactctggcgtgaagatgaacccgcagaggaacgtctggcaatggttgataaatttgttcgtcgctgccgtagtgccgggctggttagcattattgaacctgtggtgcgtccacctcgtcgcggttgggactttgatcgtgaaagcgccattgttgccgccgccgcagagcttggtggaacagaggctgatctttacaaagccgagatgccattagggggcaaaggcgatgaaaaaaccttacttgccgcctgtcagcaacttaacgatcagatgaagatgccgtgggtaattctttcttctggcgttgatgccgatatttttggccgtgcagtaagtattgccatgaaaggtggtgcgtcgggcttcctggctggacgagcggtttgggcgtcggttgttggtgcacaagatccacaaaccatgctgcgcgatgtctccgttccacgcttgcaacggctggctgaaattgtcgatgaaggtatcgcgcaacgctaatcccctatggatatcgattctggagaataacaatggataaaattacccaggttttattttcagatattgggaaagtcaccactcaatatgttgaagtaccacaccagcaacttaaaccgcacgaagtacggattgcgcccgtgttctacgggatatgcggttcggatctgcatgttctgaaaggcggtcatccgtttgccaaaccgcctgtcgtccccggtcatgaaattgcagcgcgcgttacggaagtgggcagcgacgttaaaaatgtacagccgggcgatcatgttgtggtcgatcccatcatggcttgcatggaatgccgagcctgcaaagcaggacgttttaatctttgtgaaccaccgcaggttgctggtttccgcgcaccgggctttgctcgctcacaacacattgttcctgcgcgtaattgccatgtcgcaccagcctctttaccgctaaaagtgttggcctttgccgaaccggcggcttgtgctcgtcactgcgttaaccgaatgccgaaagcttctctggaaagcgtactggtgattggtgccggaacgataggcttatccatcgtgcaggcactgcgcattatgggggcaggtaagattaccgtgattgaacctgacgctgccaaacgcgcgctggcgttaaagctgggcgcagcagaagtttgggcaccaggtgagctggccgcagatgtgcgatttacgggggcgattgatgtcgttgcagcgcaggccacgcttaacgatgcatgtacccgtgtatatgccggaggcaccgtcgtgtgcatgggcgtaccaagtgggccgcgtgaaataccattaccgatgatgcaacgtttcgagcgtgacttgctcaactctggcatgtacatccctgaagatttcgatgctgttatcgaatggctggcggatgggcggtttgataccagtgaactggttaccgatttatttgccattgaggatgcagcggcggcattcgaacgcgcgcagcaaaatgattccataaaggtcatgctgcaatttgcgccggaatgattttctaaatctctgtctggcgctgcgtcacgccagcgccaccctacaacaattaaaaaggacactgcgatgagtcaaatcaccagtcctgcaacttattcaattagtcggccacaggacgtaattgatattgttaataagaactctgcaatcaacaccagtatcggcgttatttttattgctttgggcggcatattgattgatgcctaccaggcggcgatggtggggtttggtaataaatacattgccgctcaattcggcatttcgccgggtcttgctgcaaccgtcaatgcatcagtattaatcgccgcgttaattggcggtttattagcgaaccgagtaataaaccgctttgggcaaaagcgggcatttattattggcatggggctgtgcaccatcggtgctgcagcggtagctattgctcccagtatctggtgggtgctggtgtgccgcgtcatcatgggctttggtttaggcatcgacttccctttggcaaccaatgccgtggcagagcttcgtggttcaacgtcgaagaaaaccggcacgtcggtcaacctctggcaaatggcctggtatgtttcgacaaccgttgtttatttggtgcttttgccgctgcttctgtcgggtatcgctgaagaacaattgtggcgttacggaatattcatcggagctatttttgcagtcatcttcatgattttgcgttacttctttattggtgaatccgcaatgtgggccgcacgcgtcgggcgttaccaggaagcgtgcgacattctgggaaaacgttatggtgttcaggctcgcgttgcggcatcgggtacaacagaagcgaaattctcggaaaaagcagagaataaatacagtggtggatatggcatcttatttaatgatcgttaccgcaaacgcaccattcttggctgtgtcgtggcaaccatgcaggcgtggcaatataacgccgtaggtgtttatcttcctcttacgttggcgggaataataagtggcgggcttactggcgcgttaaccggttctgccgtcgtgaatgccctttgtggggtgacaggcgggatgatcggctcgtttattctccaacgactgggtactcgccgacagtcgatgtatggatttgctgttgtgaccttagcattgctgtcgttaggcgcactggcaacgactaatccctggctgtctttagggttattgggatcaattattttcttccattcagcgggtcctggtgggctgggcatgaccattgccacactctcttatcctcccgctattcgccctactggggtcggatttgcccgcgctattatgcgcacaggggcaattgcaggactcattttctggccgatgctgtggggtgcgttgaaaactgaagcgttttactggttggcaatcgtgccattcctgggattcctgacctgtgtattgattaattgggaaccactgggtgcaaatgttgatgctgaggacgcagaggttctggctgaattgaagaaataatttaatgcgcatcggtttaagccgatgcgcattaattcaaactgcccacgtttagtggttcgtatcccagatttctcgcctaccaggagaggaaaattatgtctgaaaagttacccgcaccgcgtgaagggctttccggtaaagccatgagacgtgtcgttatgggcagtttcgcaggcgcgttaatggaatggtatgacttctttatttttggcacggcagcaggactggtatttgcaccgctgttttatccagacagcgatccttttataggtcttatagcttcctttgcgacctttggtgtcggttttctgactcgtcctttaggtggcatcgtctttggtcattttggcgataaaatagggcgaaaaataacgcttatctggacgttggctattgtcggttgctccacatttttgattggttttattccgacgtatcaggaaattgggatctgggcaccgctcatattaatggtgctacgtttaattcagggctttggtcttggtggcgagtacggcggagcggcattgatgaccatagaatcagcgcccgaatcccgacgcggatttttaggttcactcccgcaaacggctgcgtctgtgggtattatgctggcaaccggtatttttgctctctgtaaccattttcttacttcggagcagtttctctcctggggatggcgcattccgttttggctttctgcggtgatgttgatcgttgggctgtttatccgcctgcataccgaagaaacgctggattttcaaaagcaaaaaacgacgaataataaagaaaagtccgttcctccgttgattgaattattcaaaaaacatccacgaaatattttattggcactgggtgcgaggctggcggaaagtgtctcctctaatattattaacgcctttggtattgtctatatttccagccaattagcattgtcgcgagatattcccctgacgggtatgttgattgcctcggcgatcggtattttcagttgtccattggttggatggttatcagatcgtataggtcaaaaaagtctgtatttgtcgggagcaggattttgtgtcctgttcgcgtttcctttcttcttattactggatagcaaaagtacgctcatcatctggtgcagtatgatcctcggctacaacttaggtccgacgatgatgtttgccgtgcagccaacacttttcacccgcatgttcggtaccaaagtacgatataccggcctttcttttgcttatcaattttccgcgattcttggcggactaagcccccttatcgcctcaagtttgctggcgctagggggaggaaaaccgtggtatgtcgctctgtttttatttgctgtctcagttctttcctttgtttgcgtctggctgattgagccgaccgatgaacaagaaaccgcttcttaccgctacatcagggaacaatctcatgaaaactgaacgaaaaaacgagcattacctggcgctacaacaggcgtttgacgcgccatggcctgggcctgtaggagagttagtgatgctggaaaaaggcaatattcacctgcagatttatccgcatgatggtgccaggataacctcgttaaaggcatttggttctgaagtattacgccaatggcagccgcagcgcagagcttttcagtatggctgtttcccaatggtgccgtgggcagggcgactggggaatgcgacgctgaatgctggtgggcaatgttattctttacccgccaataaaccaccacatgcgttgcatggtatggcttgttactcaacgtgggaaatcatcgacaaaacagcagattccctgactttacgtatgcccctggcttcaccgtggccctggcaaggggaagtgattcagacttttttgctggagaacgatgcgctggttttgcaactggaagtccattcatatgccgatacattcccggcctccgcaggctggcatccgtggtttgcgaaaaagctgactccgcaaaatacagaatcgttgcaggtgctttttgatgcggactggcaagaagaagcgggtagtgatgaactgccaactggaaatcgtatctctcctcaagttggtccctgggatgactgttttggtttttatgacggggtgaaggttaagttactgtggcctggtaaactcgcgatgaccatgacctcttctgcaaacagtctggtggtatttgataaacagcccgatgccacctgtattaacccgctgactcaggcacctaacgcaataaatctaacgccggaatttgtgacaccagataagccgctggtcatcgaaactcgttggcaatttacacctgaatcttaaccattcatctattgcgaaaaagccagtgaaattactctgctttttcgcaatcagcatcacaagattacccttattgccacatagccaaacccatcctttcccgctacagttaatttcttgtggcgcgaaaggaggcaaaaatgctctatatctttgatttaggtaatgtgattgtcgatatcgactttaaccgtgtgctgggagcctggagcgatttaacgcgtgttccactggctacgcttaagaagagtttccacatgggcgaggcgtttcatcagcatgagcgtggggaaattagcgacgaagcgtttgcagaggcactgtgtcatgagatggccctgccgctaagctatgagcagttctcccacggttggcaggcggtatttgttgcgctacgaccggaagtgatcgccatcatgcataaactgcgtgagcaggggcatcgcgtggtggtgctttccaatactaaccgcctgcatactaccttctggccggaggaatacccggaaatccgtgatgctgctgaccatatctatctgtcgcaagacttgggtatgcgcaaacctgaagcacgaatttatcagcatgttttgcaggcagaaggtttttcacccagcgatacggtctttttcgacgataacgccgataatatagaaggagctaatcggctaggcattactagtattctggtgaaagataaaaccaccatcccggactatttcgcgaaggtgttatgctaaaaaccattcaggacaaagccaggcatcgtacccgtccactatgggcctggctaaaactactctggcaacgcattgatgaggacaacatgacaaccctggcaggtaaccttgcctatgtgtcgttgctctcattagtgccgctggttgccgttgtttttgcgcttttcgccgcttttcccatgttttccgacgtcagcattcagttgcgtcactttatttttgccaactttctgcctgctactggcgatgttatccagcgatatatcgaacagtttgtcgccaattccaacaaaatgaccgccgtcggggcgtgcgggctgatcgtcacggcgttattgttgatgtactccatcgatagcgcgttgaataccatctggcgcagtaaacgagcgcgacccaaaatttactcgtttgccgtgtactggatgattttaacgctggggccgctgttggcaggggccagtctggcgatcagctcctatctgctctctctgcgctgggcgagcgatctcaatactgtcatcgataatgtgttgcgtatttttccgctgctgttgtcgtggatctctttctggctgctgtacagcatcgttcctaccatccgtgtacctaaccgcgacgcgattgtcggcgcgtttgtcgccgcgctcctgttcgaagcaggaaagaaaggtttcgcgctttatatcaccatgttcccatcatatcagctcatttacggtgtgctggcggtgatccccattctctttgtttgggtctactggacatggtgtatcgtcttgcttggcgcggaaattactgtcactctcggggaataccgcaaattaaaacaagctgctgaacaagaagaagacgacgaaccatgattgcattaattcaacgcgtaacccgtgccagcgtcaccgtggagggagaagtgacgggtgaaattggcgcgggacttttggtgttattgggtgtcgaaaaggatgacgacgaacagaaagcaaaccgtctgtgcgagcgtgtgctcggctaccgcatctttagcgatgccgaaggcaagatgaatctcaacgtgcaacaggcgggcggcagtgtactggtggtttcccagtttacccttgccgcagataccgaacgggggatgcgcccaagtttctccaaaggcgcatcaccggatcgcgcagaggcgttatatgactatttcgtcgaacgctgccgtcagcaagagatgaacacgcaaacaggacgcttcgctgcggatatgcaggtatcgctggtcaatgatggccccgtgacattctggttgcaggtatgagccagcttccagggttgtcacgggaaacaagagagagtatcgctatgtatcaccttcgggttccacaaacagaagaagaattagagcgttactatcagtttcgctgggaaatgttgcgtaagcccctgcatcaaccaaaaggttcggaacgcgacgcgtgggatgcgatggcgcatcaccagatggtcgtcgacgagcagggtaatctggtagcggtaggccgacagtatattaatgccgacaatgaagcgtccattcgctttatggccgttcatcccgacgtgcaggacaaagggttaggcacgctgatggcgatgaccctggagtcggtggcacgtcaggaaggcgttaagcgcgtgacctgtagcgcccgtgaagacgcggtggagtttttcgccaagctggggtttgttaatcagggtgaaatcaccacgccaaccaccacgccgattcgccattttttgatgattaaacccgtcgccactctggatgatattttgcatcgcggcgactggtgcgcgcagctgcaacaggcgtggtacgaacatatcccgctaagcgaaaaaatgggcgtgcgcattcagcaatataccgggcaaaaatttatcaccaccatgccggaaacaggcaatcagaatccgcatcacacgctgtttgccgggagtttattctcgctggcaacgctcactggttgggggcttatctggctgatgctgcgcgaacgccacctcggcggaacgattattctggcggatgcgcatatccgctatagcaaaccgattagcggaaaaccccatgcggtagccgaccttggtgccttaagtggcgatctcgaccgtctggcgcgcggacgaaaagcacgggtgcagatgcaagtagaaatctttggcgacgagacgccgggtgcagtgtttgaaggcacgtatatcgttctgcccgcgaagccatttggtccgtatgaagagggcggaaacgaagaagagtaggggcgttttacttgactgaaaaggttttcaatctgaaaaccttttctgggccctggtccggagttaccttcccgctctccaggcaacatcccgtagcgccgatcgcgcagcctcactgataccacctaactgaaaaaatccgtggataacgccaaggtagcgttggcaggtgcattgcactccttgccctgtcatgcggtgatacaacgcttcaccttcatcgcaaagtgggtcgtattcagcggtaatgatatgtacaggtggcaagccattgaaatcattgcgccaaatagggctggcttcaggatgcctgcgttcaatgcctggcaggtacatctcaaagccgctcagtaaagtgtcgcgtgtgatgatgtaatcgtgaccattgcgtatgtagctttcgaaatgcccagtcgcatcaagcataggataaattaagatgagttgtgctggttgccactcgccagcacgcttcaatcgcaaagcagttaccagcgccagatgcccgcccgcactgtcaccggcaagagttattcgttgtttatcaacgccgagtcgttcggcgtgttgccggactaattctgcacctcgttgtgcatcatcatgggcggcggggaaagtatgttccggtgccagccgatactggacggcaataatccgacattgcccgtaataggctaactggcgcagctggttgtcgtgagttgcgaacccgccgctaacaaaacagccaccgtagtaataaattatcgtcgggagtaatgtcggggcattcagcggtgacactattcgtaaggtcatcccttcaagttcgatagtctgaatatctacccgcgtttctgtctcacccgcaaggacagcgctggcgatatagccctctctgcgctgcgtaatactttgttggcgcgatgaggggcgacccgcagcgataaactcttcgactaactctgcaattcctttttccagtgccatagtagaactcatttttgctgtatgaatgtgggtcttcccctgttgtggtgggtggtacataattgagtgattttcaaacaccacacagtacctttatggtgtctctttttacatgagagggaattcttatgagtgtgccgcaaacaaaagctgaactgcttttagctattgataaaaattttagtaaattaattagttacctcaacacaatcccaccagaaattacttcagataaatcaatggacggacacgccaaaggaacggagatgagtgttcgtgatctcgtttcgtatctgcttggatggaatgctcttgttgtaaagtggatcgcttctgatgctaaaggtctgcctgtcgattttccggaaactggctataaatggaatcagcttggccttcttgctcaaaaattttactcagattacagtgagttaagttatgagttgttagtagctgaacttcagactgtaaaaaatgagattgtgaaccttattaatgatcgtaccgatgatattttgtatggaagaccatggtacacaaaatggacgatggggagaatgatctcatttaacacatcttcgccttacgccaacgctaatggaagattaagaaagtgggcaaaaaataataatatcagtttaaagtaagcttcagaatgaaattatatggacgaaaaatccctctatgcccatatccttaacctgactgcaccatggcaggttaaatcccttaccctcgatgaaaatgcaggttccgttactgttacagtcggaattgctgaaaatactcagttaacctgtccgacctgcaggaaatcctgttctgttcacgatcaccgacatcgtaaatggcgccaccttgatacctgccagttcatgacattagtagaagccgatgttccccgcgttatgtgcccggagcatggctgccagactctgcctgtaccgtgggcaggttccggcagtcggtacactctgctgttcgaatcgttcgtgctctcatggcttaaaatcagcaccgttgatgcggtcagaaaacaacttaaacttagctggaatgccgttgacggcatcatgacccgcgcggttaagcgaggcctgtcgcggattaaaaagcctttatcagtgcgtcatatgaatgtagacgaagtcgcctttaaaaaagggcataggtatataaccgtggtatctgatcgcgacgggcgggcactggcattaaccgatgatcgtggcacagagagtcttgccagctatctccgttcgcttactgacagtcagttgttggccatcaaaacactgtcgatggacatgaatgcgggctatataagagcagcgcgtatccatttacccaatgcggtcgagaaaatcgccttcgatcgcttccatgtggcgaagcaactgggcgaagtggttgataaaacccgccagaatgaacatccgcacctccctgttgaaagtcgtcgtcaggccaaaggtacccgcttcctgtggcagtacagcgacaaatggatgactgagtcccggcaggaaaagctgatgtggttgcgggaacagatgcaacagacaagccagtgctggacactgaaagagctggcaaaaaatatctgggatcgcccctggagcacagaacgcaggaatgactggttgcagtggatatcgctggcgtctgaatgtgatgtgccgatgatgaaaaacgcagcgaaaaccattaaaaaacggttatacggaatactgaatgcaatgcgtcatcgcgtctcgaatggaaatgcggaggcgctgaacagcaagatcagactgctgaggataaaggccaggggataccgaaaccgggaacgctttaaactgggagttatgttccactatgggaaactgaatatggcgtactgagtcttcccaccatgatcggggaagacccatgaatgtacagttttatacacccgtttttgctggatggatacagggaaattcacgggcgtgaaaaatctggaaagcgcctcgcaaatgtaaagacaaacccggcagagacgtggttttgctggagcactatcagtaagctagtggtttcaatggtacgtcaatgacgtacaaaaaggattgttactctaagccaatggcgtataattatgctcttcatcgaaacggaaatttttactgaagatgttcaaaaactgctgaacgacgatgaattcagtcgttttcagtttttcctggccttgaatcctgactatggtgaggtaatacctgaaactggtgggttaagaaaggttcgatgggtctcaggaggaaaggggaaacgtgctggtgtcagggttatttactttcatcaggttaaacattatgagatcagattactgcttatttatcgtaagggtattaaagatgatctgtctccccaggaaaaagcaatgctccggttgttaaatacgaggtggtaaatggataaggcactttttgagcggttgactcacagcatggcccagatgaatgaaattattgaaggaacgcgacagccttcacggacttttgaagttgatgctatgaaaatcaaagaaatacgccgcgcttcagggttgtcacaatctaaatttgccgatcttatttccgtaagcgtagacacgttgcgtaactgggagcaggggcgacgttcaccgaccgggcctgcaaaggctttgctgcgagcgattgccaatgatccgcaacatgtgctgcaagcacttaaccgttagaggcatggttatgccatacagaaagcaccagcattcagaactcctatgaaagcggcatagtgccgcctgctcaggagttttgctatgacccgtaatcgtgctgaacgtcgccatcatatggtgcgattaaaaaaaatccgctgtcgttatcgcactgcaggcgatggaagcaaaaaagcatcaggtatttgctttcgtactccctgtatttgttcttgttggatgtgtgggcatcgacgctatcataatggtccccgcgtatcggaaattcgtgcaaaagcacgctatgcgaattaagggaaaatgatgaactattttaaggaagcacatttttagaactcttaacaggagactaaaaatgtccacgtttaatacgcgtaaagatagggatcgtaatggtaaagcgaagccgcataagcattcagggatcccaacacttacaggtaaatggcgtcacccttcaatggattgttgggtaaactacagtacaccgggcgatcatgaatggaagcggctctatactacgcttcgccgtcgcgcagatgatcgacgccaatgtcatcgggtaatgcagggggatgatccggaaggaatcgtctggttcccggactgttatccacaaatttactactactaacaattaaagaccggttggtgcggcactgaccggtcgttatgaatggtagatttcaccttaaaccctggtgcggtaaagctgctgactttttcgggtacaccatcctgatgaagcaaatgaagacccaatcaaaaaatattcttgaatataaaatatttatagcatccataattcatccttattatttgttgtttcttttctgtagatgtgcccccgcttaattaaaagtaataaaccatttttgagtaacaattgaaataactgaaactgttacattatctttggatgccgtctcgcaaaaacaaaacaatatgaaaaaatccgctttcgttaattaactttccggcgtaattttcgcacatacattaatgagtaatatatgtaaggtggtggtaatggcgatgaatacggtttttcttcatttatcagaagaggcaattaaacggctgaacaagcttcggggatggcgtaaggtttcgcgctctgcaattttacgcgaagcggtagagcaatatctggagcggcagcaatttccggtgcgtaaggcaaaaggcggcaggcaaagggacgaggcagttggtgttgaagaactatgtaagcagcataaggaatgacaaaagtttttttattcatgaatataaaaaaccagatgcccttattctggtattaatacaaggctgttttacttgaacttataataactgcaactgttacatcatatctggaaaacgcctcgcgaaatacgagagattttgcgggaatagcaggtgtcgtcacaccctatgagctgtaatccgggcgaccagcgccacccggaaaacgtcagagattactccccttcacccggaaacaggaacgggttaatggaactacgggcatagccttcttgctccattcgcgcgtccagtaccagagaggcgaggtcatctgccacggcttcaactttcggttctttttcctgataaagaatcttcaggtaagtgccgcagtcatcgcagctttcggctttaatcgcggcctgttcgtcatccagcgaccagtaatgcagtttgccgctttgttcacagttgctgcattttacgcgcactacgtgccattcagtttcacacaggttgcagtgcaggtaacgcagaccctgagtggtgccaatttgcaccatgctggacaccggcatagagccacataccgggcaatattgacgttgttcgccgtattcagcgcgggctttgccggggatcagattagccatctgcgcccagtagagcgacagcgcagcccagataaacggcgctttatcgctgctgacggacgagaaatcagaggcaaacagtgcgctggccatatcttccagctcctgagtcgatgccttctccagattctcaatcactgccagcgccgggccgctcatttcaggtttcagctcagcaatcagcgccatcagcagcttttgccagtgcttatcacgcggcagaacgtgaatatccagcgggggcttgccttgtgcgctggcttctttaatgcgcgtggtcagatccatctccagcggatggtcgtacagcaccacttcctgggcgtgggcgataagcgcagcaaagcgcaggtaatcacccagcggattattttctgccagctcgcgcagacgctcggcgcggcggttgtataaattcttgagccgagggaacaataacggcggaatcatatccgccgtacgtttctcgctcgaacccagctcatcttgcgggattatgcgaatactcattcagctttcttttccgttgtcttgcggacctcacggtaccagcgcgggtgatgtttctttgcccatgcgctggtcacccatccttccaccatggcggtaatcgtgcctttcacccaaagggcggcgtagatatgcaccatgataaccacaattaacgccactgcggcaaatgaatgcagcattaacgcgaatcggatcaccgggattgagaaagcaggcgcaaaataaggacgccagataatcacgccgctcaccagcaacaggaccaggaaaataatcgccgcccagaaaacgcatttctgaccgaagttataacgcccggtgtcacctacttcctcgttgacgacgatcttacgaatattcttcgcccaaaagatatcatcccgattgattaggttgtgatgccagtaacggaaaaacatgatgatgaacgaggcaaacataaccacgccgacaaacgggtgcagaatgcgcgccagctgcggtgtgcccatgatttgcatcaaccagttgaaggacgggaacaaaaagcccagcccgctcaccgccgccaggatgaagcagaaggcggtgatccagtggttgatacgttccggcgcggtgtagcgcacgatggtgtcacgtcgtttcatttgcgctcctcgtctttctcttcgtgcagattattctcttcctcatccgcacggttcggaccgacacccacgtagtggaagatactggctgcgaaggtagccgcaaagccaacagctgcgagcggtttccagatgcctttccagaatttcacggtttcgctgatttccgggttctccggcaagccatgatacagatttggcttgtcagcatggtgcagcacgtacataacatgtgtaccaccgacgcctgccgggtcgtacaaacccgcattgtcgtaaccacgggttttcagctccgccacgcgctcgctcgccagcgttttcatcgactctttcgtaccgaagtgaatcgcgcccgttgggcaggtcttcacgcaggccggttcttgcccaaccaccacgcggtcaacgcacagcgtacatttgtagacgcggttgtcttccgggttgaggcgcggaatgtcgaacggacagcccgcaatgcaataaccgcagccgatgcactgctcggactggaagtcgacgataccgttggcatactgaataattgccccttccgccgggcacgctttcaggcagcctggatcggaacagtgcatacagccgtctttgcggatcagccattccagtttgtcgttctgctccacttccgagaatcgcatcaccgtccacgatttggcacttaaatcattggggttgtcgtacaccccaatgttattgccgacggtatcgcgaatgtcgttccactctgaacacgccacctgacaggctttacagccgatacaggtggtaacgtcgatgagtttcgccacttcttcctggaagtcccgcgcctgaggcgcgggggtcagaccgttagtcgcggaacgacgaatgatatcttgcgattgataagccatatgtcgtctccgttacaccttttccacattcacaaggaaggacttaaactccggcgtctgcgtgttcgcatcaccgacgaatggcgtcaacgtattggcaataaagccttttttcgcaacaccttcatagccccagtgaataggaataccgatggtatcgatatctttgccgtttgctttcagcgtgcgaatacgtttggtcactaccgctttggctttgatatagccacggttggaggagactttcacagtatcgccctgggcaatgccaagtttattcgccagcgactccccgatttccacaaactgctctggttgcaaaatcgcgttcaacagcgcgtgtttggtccagtagtggaagtgctcggtcagacgataggtggttccgacatacgggaacttatcggctttacctaatgcttcggcatcgtctttaaagatacgcgccgccggattcgagataacgtttggatgcagcgggttagttcccagcggcgtttcaaacggctcgtagtgttccgggaacggaccttccgccatcttatcgagggcaaacagacgtcccatgccttcctgctgcatgataaacggccctacgccgctgcccggaggcgctgcgctgtaatccggaatatcccagccggtccacttagtgccgtcccatttcagcaactgacgcttcggatcccacgggttaccctgcggatctgcggaggcgcggttatacagaatgcggcggttaagcggccatgcccatgcccagcccagcgtgttaccgaggccagacggatcggcgttatcacgacgcgccatctggttgccttccggcgtccagctaccggcgaaaatccagcagccacaggaggttgtgccgtcatcgcgcagttgggcgaacgagctaagttgttggcctttcttgacgataaccgcaccggttgccgggtcggtaatatcggccagcgctttgccgttgctctccattgccacttcttctgaagatggctcatgcggaatggcgtagttccaggtcatgttcagcacctggtccgggttcgcgccaccctgttcggcatacatcttgcgcaagcgcaggaagataccggagaggatctcgccatcagtcagcgcaatccccggggcgtccgcacctttccagtgccactgtaaccagcgacctgagttaacgatagaaccgttctcttccgcgaagcaggtcgatggtagacggaacacttcggtctggatcttcgacgagtcaacttcgttcagctcaccgtggttctgccagaagttagaggtttcagtgttcagcgggtcgatagtcacgaggaatttcagcttcgacagacagccgatcactttgtttttgttcgggaatgaggcaacagggttaaagccctggcagatatagccattgaccttgccttctttcatcatctcgaagtattgcaggacgtcgtagcctttatcccacttcggcaaccagtcaaagccccagctattttccgccgtcgctttatcaccaaagaatgccttcatcatagagacgaagaatttcgggtagttgccccagtagttaacctggccttccagcagtggtttcggcgtgttggcggtaaggtaagtttgcagatcggtctgcttctcgcttggcagcgtcatgtaacctggcagactctgcgacagtagccccaggtccgtcagcccctgaatattggagtgaccgcgcagggcgttaacgccgccgcctgccatccccatgttgccgagcagcagctggatcatcgccatcgtacgaatgttttgcgcaccaatggagtgttgcgtccagccgagggcgtagaggaacgacgctgttttatcgtgagcactggtttcggcgatgtattcgcagactttcaggaacgcgtcttttggcgtaccgcagatgttttcaaccacatctggcgtataacgggaaacgtgctgtttcagcaagttccacacgcaacgtggatgttgcagggtagtatcacgtttggcgaagccgttttcgtccagttcgtaagtccaggtggacttatcgtacttgcgtttttccgcgtcgtagccggtgaacaggccatcttcaaagccgtaatcctcacgcacgatcaggctggcgttggtataggcttcggtgtattcgcggttgaatttttcattgttcagcaggtacagcaatacgcctgacaggaaagcaatgtcagtaccggaacggataggggcatagtagtcagccaccgccgctgtacgtgtaaagcgaggatcgatcacaatcagcttcgcgccgttgtgaattttggcttccatcgcccagcggaacccgaccgggtgagcttcagcggcgttaccgcccatcaccacgacgaggttggcattcttgatgtcgacccagtggttggtcatcgcaccgcgaccaaatgttggagcaagacttgctaccgttggtccgtgtcagacacgcgcctggttgtcgaccgcgagcatacccagcgcgcgggagaatttttgcgttaaatagccggtttcgttgctcgacgcggaagcacacagcattccggtggagagccagcggttaacagtcgcgccttcggcgttttgcgcaatgtagttcgcatcgcggtcttctttcatcagtttggcgatgcgatcaaacgcctcttcccaactgatttgttgccatttatcagaacctggcgcacggtattccggaaacttcaggcggctttcggagtggatgaaatccaccaggccagcgcctttcggacaaagtgctccgcggttgaccgggtgatccgggtcaccttcgatatggaagatagatgctttggcgttttttgctccgtcaccgaggctgtacatcaacagcccacagcctacggaacaataggtgcaggtattacgggtttcgcgggtgcgcagcagtttatactgccgggtttccgcgagtgctacgctgggtgcaaaacccagtgccgctgccgtggtgcctgccataccgccagcgcagatcttaaagaactgccttctgctgacctgcatggattgctccttgtttcgacattgtcacgtcccatttacattcgcttgctgcgtgtgcagggagtgggagttatttttctttgcggaaggggccgcaaaggtccagaattggctcaatttccctccatccaggaagggtttgtagcagaataccataatgttggtgtgtgtgttcttatctggttaatagaaagtgaaaaaaacacagcaaaaagaaatcgagaatgtgacaaatatcacaggtgttcgtcaaattgagttatggcggcgtgatgatttacaacacccacggttagatgaggtggcggaagaagttcccgttgcgctggtctacaacggcatttcgcacgtggtgatgatggcgtcgcccaaagaccttgagtactttgcgctcggtttttcgctttccgaaggaattatcgaaagcccgcgcgatatcttcggcatggatgtcgttccttcctgtaatggcctggaagtacaaattgagctttccagccgccgctttatggggttgaaggagcgccgccgggcgctggcgggacgtacgggctgtggcgtatgcggtgtagaacagcttaacgatatcggtaaaccggtgcagccgctgccgttcacccagatgtttgatctcaacaaactggatgatgcattacgtcatctcaatgatttccagccagtggggcaactgactggttgtactcacgccgctgcctggatgttgccatctggcgaactggtcggcgggcatgaagacgtgggtcgccatgtggcgctggacaaactgttaggccgccggtcacaagaaggggaaagctggcagcaaggtgcggtgctggtttccagccgtgccagttatgaaatggtgcaaaagtcggcgatgtgcggcgtagagattttgtttgcggtgtctgccgcgaccacacttgctgtagaagtggctgagcgctgtaatctgacgctggtgggcttttgtaaaccgggtcgggcaacggtttatacccatccgcagcgtttgagcaattaattaaaataagtcctgtgatatatattaaattgcaggacttattcatttcgtgaattttgttattttttcataaacaaaacgcgtgtagtggcgttaacgcctgcgctgcaacctattgatggcgtggcggtgagttatattgatgctgccgtagcgttgggtaataccattaacgaaatggataaatattacacccaggaaaattataaagacgatgcgtttgcgaaagggaaaacattccactactactctctggcagtcatgatttcagcgaaacaaattaataacctgatatcgcaagataagtttgatgcagaagcggcaatgaagaaagtgtctgaactggaaacgctggtggcgcaagccaaagaagcggataaaagcggcatgaatttctcgtttattaattcggcaggccagtatcaactcgaggctaaaaaatacgttcgccgcatcagagataaagtcctgcactctgactgggataaagagcaacttcaggacgcaaactcaagctggatggccgaagactcatttccacgagcgttatgcgattacaacgaaatggtcgatgaaatattacagttaattgtaatcgcggggcgggtttgtgatgagcacggatatgtcacgaagtcgtaacaatataaagcagagtgaaggataaattttgtgaataaagtatcattatttaatgattttgtgaatgttaaaatgtctcagataatttgtttaagcgttatttatatttgtggcttatgagtcagcgtgaatcatatctaatattttttacgatatttagttaaaaacggcactattgttatattcctcacgttccaggaaatcagcggatttactcatattatgcggcgggatactatccatcggcctgctgaagttggattaaaaattcgaaagtgcacaccttatatttctctatatacgtattccttttggaaagcgtagggtctcctttatttcagggaacgtaaataatgaaaaaatcgacattatctttagccatcggtttattattggcatgtagtaccggtatggcaaaaacacagcatttaacgctggaacaacgcctggaagcggcagaaatgcgggcagcaaaagcagaggggcaggttaaacagcttcagacacaacaagccgccgagatccgcgaaattaaaaccgcacagggcaacacgccggtaaacggtcaatcaacgacggagtcagagaagaaaaacgccaccccgcctaatctcctgctttcagggtatggcgatttaaaaatctacggtgacgtagaatttaatatggatgcggaaagtaatcatggcctgctggcaatgaccaacgctgatgtgaatagcgatcccactaatgaacagtggaatctcaatggtcgtattctgttaggttttgatggtatgcgaaaactggataatggctatttcgctgggttctccgcacaaccgctgggggatatgcacggttcagtaaatatcgatgatgcggttttcttctttggcaaagaaaacgactggaaggtcaaagtaggccgttttgaagcctacgatatgttcccgctgaatcaggatacctttgttgaacattccggtaatactgcgaacgatctttatgacgatggcagcggttatatctatatgatgaaagagggccgcggacgttctaacgctggcggtaatttcctcgtcagcaaacaactcgataactggtattttgaattaaacacgttactggaagacggaacatctttatataacgacggtaattatcatggacgcgatatggaacagcagaaaaatgttgcttatctgcgtccggtaattgcctggtcgccgacggaagaattcaccgtttccgcagcgatggaagcgaatgtggtaaataatgcttatggttataccgatagcaagggtaattttgtcgatcagtccgatcgtaccggttatggcatgagtatgacctggaatggcctgaaaaccgatccggaaaatggcatcgtggttaatcttaataccgcctatttagatgctaataatgaaaaagatttcacggcagggattaacgcgctgtggaaacgtttcgagctgggttatatctatgcacataataagattgatgaatttagtggcgtggtttgtgataacgattgctggattgatgatgaaggaacatacaacattcacaccattcatgcgtcttatcagttcgctaatgtgatggatatggagaactttaatatttacctcggcacgtattactccattctggatagcgacggcgataagatacacggcgacgatagtgatgaccgttacggcgcacgcgttcgctttaaatacttcttctgatgaaagggcggtgctggatattttccggcaccgcaactcattaaggcaggtaaaacacttcttgcagttcgctactgactgggctgttatccgcattagcgggcataacgtcggtcatatatttccaccaacgttggcaaacatctgtactggcaaccgcattccaccgttcttcagattcaatctctaccgtggcaaatagcagattatgcgctttgtcgagatagatggcgtagttatgcgcaccgtgagatttcagcactgcttccagttccggccagatgggattatgccgacgctgatactcttcgtgggcgtcggggtttacctgcatgacaaaggctttgcggatcatgtttgctccttacagcgccagcgcactggcgagtggtgtaacgccgaaacgctggccgagcgctatcaactcttcacggctgatggtctgtttcatgccgcccatcgaataaaccttcactaatatttgtgctgatttttctgcggtgtcgattaaaccgaaggtttcatccagtgtcggtccggaaccgaacacaccgtggaagggccacaacatcagcgaatgtttttgcatctcttgtgcagttgcctggccgatttcgtccgtgccgggtaccatccacggcagaatgccaacgccatccgggaataccaccagacactcggtgctgccttcccacagttggcgagtgaagaccgcggtgtcgttttccagcacgtaggtgagagcgatcaggttagtggcgtggcagtgcatgatcacccgatctttgccgttggtggctttaatgcgctcgcagtgggaaaggaagtgagctggaagttcggaagtggggacggcttcgttggttaacccccaaagaatgtggtagcccgcgccgtcgctgtcgacttttacgatgcctaagttagccgcaggatcaagctggacgttacggaagaatttgccggagccggtgacaataaacggtgtatttgccagtaaaggcatgggctggctgagcgggatatagcgcggttgttggtgaaaattgtcgtgatatggtgcgatatcggcgtcatccaggcgcagcgtcaggttgccgccgttgcgctcgtcccagcctttcagccaggcatcggtggtggctttgatcattccctggacaaaccaggactgggttatgttttgcatgttctgtgttcctgttaattggacgtccgtgcctgttgccggatgtacgatctgtaggccggataaggcactcatgccgcatccggcaatcaatgcctgatgcgacgctgtcgcgtcttatcaggcctacaactgctgctgacccgtaggccggataaggcactcgtgccgcatccggcaatcaatgcctgatgcgacgctgtcgcgtcttatcaggcctacaactgttgctgacccgtaggccggataaggcactcgtgccgcatccggcaatcaatgcctgatgcgacgctgtcgcgtcttatcaggcctacaactattgccgacccgtaggccggataaggcacttgtgccgcatccggcaatcaatgcctgatgcgacgctgtcgcgtcttatcaggcctacaactattgccgacctgtaggccggataaggcacttgtgccgcatccggcagtgtttacccgcggcgactcaaaatttctttctcataagcccgcacgttctccagccattcgctacccgctggcgtatcgtgacgctgacaatacatttcccataccgcctgccacggcaacgatttctgctcttccagtagcgccagacgcgcagtgtaatcgcccgccgcttccagcttgcgcagctcagcggtaggttccagtaacgcacgtagcagggcttttttcatattgcgtgtaccaatgacccacgcggcaatgcggttgatagaggcatcgaagaagtcgaggccgatatgcacccggtcaaacagatcgtgacgaacaatctcactggcaatcgcctgggtttcatcatccagcagcactacgtgatcgctgtcccagcgaaccggacggctgacgtgcagtagcaactgcggcacatacagcatggcggcggaaatcttgtcggaaatcacttcagtcgggtggaaatgcccggcgtccaggcacagcgccgtctggcggctggtggcataccccatgtaaaactcattggagccaaccgtgtaactctccgcgccaatgccaaacaatttgctctcaacggcgtcgatatggtgcgccggatccagcttctcgctgatcacctcatccagagctgccagcagacgctggcgcggggcgagacggtcaacggtgatatctttcatgccatccgggatccagatgttcatcaccgacggtgtgccgagttgctcgccaaaataggctgaaacacggcggctggccttgcagtgatcaatccagaactggcgaatactgtcgtcggcatgggaaagcgtaaagccatcggcgcttagcggatgcgaaaaacaggaggggttaaaatccagaccgagctgattggttttcgcccattcaacccagtttttgaagtgctctggtttgatctggtcgcgcgcgacgggcgtgtctgattccagatagatggcatgtaaattaagccgtttcggccccggaataagccgcatagcctgttccagatcggcacgtagctcgctggcattacgcgctttgcccggataattaccagtagcctgaatcccaccggtcagcgaaccttccgggttttcaaaaccggaaacatcatcgccctgccagcagtgcattgaaacgggtaaacgatcaagttggcgcagtgcctcctcgacatcaatccctactgccgcgaaacgctgtttcgccagctcccaggcctgttccagttgagtggtcatgcgcaaagctcctttgtctgtcgtgtagagtgaatctgcgccacatagtgggcaatttcactgtcaggattaggggtaaaggtggtcagattcgcggtagtgctgacgacctgacggaaatcatccacattgttgagttcatccagcgtcattaactggatgccgatattgccgagcgtcgaggcttcaacaggcccggcgatcacccgaataccgcaggcatcggcacacagctggttgagcagcgtgttctggcagccgccgccgacaatatgcagttgcgagaaatcttcaccacgcagctgcgccagctcatgcaacacatcggcatacagcagcgccagactgtcgaaaatacagcgcgccagttcagcatcactttccgggatcggttgcgccgtttcccgacacgcagcctgaatttcgctgcacatctcgtcaggattaataaagcgatcgtcattgggattgatgatgaagcggcaggccggaagtgcctgtgttgcggcgataagcgccggaagatcgttgatttgccgctcctgaagcactcgctgaagcagccataagcccataatatttttcagcacccgatagcgaccttccgccccgccttcgttggtgatattggctgccagcgccgtgtcattggtaaatggcgtctggctttcgaagcccatcaatgaccaggtgccagaagagagataagcggcgcgtgaaccgtttaacggcgaggcgataaccgcgctggcggtatcatggctggcaacggcgaccaccggaatctcattaccctgtgggcaaatccagtgacctatgacattacccggatgcgtcgggcgaccaaaccaggctttgttggcaccgctccacgccagtagcgactcgtcccagtcgtcgctattgatattgaccagttgcgtggtcgtggcgttggtatattcccagttcatcttgccggtcaggcgataactaaagtaatccggtatcagcaaagcgtgagcaatgtgtggaataagttctggttgctgctctgtcagtgcacgtagctgatagatcgtattgaagggcagaaactggatgccgctacgttgataaatatcgcgtttgccgagttgttgttgtgcctgcgccattaggccattggtgcggctatcgcgataagcaacgggcaggcccacacgctgaccctgttggtcgagcagcacaaagtccacgccccaggtatcaatcccaatgctatcgatacgaatcccttcctcgcacaccttgtttaatccaaggcgaatggcactttccaggctatccacattccaggtgacataaccgttctggctatgcaggccattgttaaaacgatggatttcgcgcagcgtcaggctgcggcattcacgctcgtaacgcgccagcatcacgcgcccactggatgcgccgagatcgacggcgacacaattgcgaaaggtcataatgtgatcctgctgaatttcattacgaccagtctaaaaagcgcctgaattcgtgaccttctcgttactgacaggaaaatgggccattggcaaccagggaaagatgaacgtgatgatgttcacaatttgcttcattgtggtgatgtgatgctcaccgcattttctgaaaattcacgctgtatcttgaaaaatcgacgttttttacgtggttttccgtcgaaaatttaaggtaagaacctgacctcgtgattactatttcgccgtgttgacgacatcaggaggccagtatgaccgtattacatagtgtggatttttttccgtctggtaacgcgtccgtggcgatagaaccccggcttccgcaggcggattttcctgaacatcatcatgattttcatgaaattgtgattgtcgaacatggcacgggtattcatgtatttaatgggcagccctataccatcaccggtgggacggtctgtttcgtacgcgatcatgatcggcatctgtatgaacataccgataatctgtgtctgaccaatgtgctgtatcgctcgccggatcgatttcagtttctcgccgggctgaatcagttgctgccacaagagcaggatgggcagtatccgtctcactggcgtgttaactacagcgtattgcagcaggtgcgacagctggttgcacagatggaacagcaggaaggggaaaatgatttaccctcgaccgccagtcgcgagatcttatttatgcaattattgctcttgctgcgtaaaagcagtttgcaggagaacctggaaaacagcgcatcacgtctcaacttgcttctggcctggctggaggaccattttgccgatgaggtgaattgggacgctgtggcggatcaattttctctttcattgcgtacgctgcatcgccagcttaagcagcaaacggggctgacgcctcagcgttacctgaaccgcctgcgactgatgaaagcccgacatctgctacgccacagcgaggccagcgttactgacatcgcctatcgctgcggattcagcgacagtaaccacttttcgacgctttttcgccgagagtttaactggtcaccgcgtgatattcgtcagggacgggatggttttctgcaataacgcgaatcttctcaacgtatttgtacgccatattgcgaataatcaacttcgttctctggccgaggtagccacggtggcgcatcagttaaaacttctcaaagatgatttttttgccagcgaccagcaggcagtcgctgtggctgaccgttatccgcaagatgtctttgccgaacatacacatgatttttgtgagctggtgattgtctggcgcggtaatggtctgcatgtactcaacgatcgtccttatcgcattacccgtggcgatctcttttatattcatgctgacgataaacactcctacgcttccgttaacgatctggttttgcagaatattatttattgcccggagcggctgaagctgaatcttgactggcagggagcgattccgggatttagcgccagcgcagggcaaccacactggcgcttaggtagcgtggggatggcgcaggcgcggcaggttatcggtcagcttgagcatgaaagtagtcagcatgtgtcgtttgctaacgaaatggctgagttgctgttcgggcagttggtgatgttgctgaatcgccatcgttacaccagtgattcgttgccgccaacatccagcgaaacgttgctggataagctgattacccggctggcggctagcctgaaaagtccctttgcgctggataaattttgtgatgaggcatcgtgcagtgagcgcgttttgcgtcagcaatttcgtcagcagactggaatgaccatcaatcaatatctgcgacaggtcagagtgtgtcatgcgcaatatctcctccagcatagccgcctgttaatcagtgatatttcgaccgaatgtggctttgaagatagtaactatttttcggtggtgtttacccgggaaaccgggatgacgcccagccagtggcgtcatctcaattcgcagaaagattaattcgccatgccgatgccgacgatgttagcggcgacaataatcaccacacaaccgaggctcaacaccgttaccggacggcgtcctgcattgttccactctttcagcaccagcccgacgataccgccgcacaatacatagaagctcatatgcagcatccagctgatgtagtcatactgcgccggaatgcgggcgtggccccaggcatagaaaaagaattgcagataccacatcaacccgcccagtgctgagagtaacacattgtgaatgatcagcggttttgccagcgagaagtcggcttttagcgacaaatctttcacttttgccagacgaatgaagcagaagccgaggttgatgattgcgccgccgcccatgatgacaacatagcttggcagagcgacatacaggggatcgacgcccagcgcggcagcggcttcatgcatcggttttgcggcgttcatcgcaaaggacatcccggcagagaaaatgccgcacatcaccgccagcaccagcccttttttcagattgaactcttcggctttaatgcccatcttgcgctctttcaactgcccggcgcgagttacaatccctacgccaatcagcgccaccagaacgccgagcaacgtcatgcgtccgccttcggtattaatcagcacatcgaaattgccgttgataattggcgtcatcagcgtaccgacaatcaacgtaatgccaatggcgatgccaattcccatcgacatgccgagataacgcatggtcaggccgtagttgatattaccgatcccccacatagcgccgaacagaaaaacaggcagcagcgtagagagactaaacgagctgtaatacgcccagaaattcggtagtaacagggcgctgatggcccacggcaggataatccacgaaacaatcccaccgactgaccacatggtttcccatgaccatttttttacttttttgaacggagcgtaaaaacaggctgcactggccgcgccgatcaaatgccaaaatatccccatcgtaatcgcgttactcatcttcttatcctcatcattttttcgtcgcgtcacatctccgacgagatgagtgtaaaaattgagctgtcgattaacctttcgcctgttgccgccgctgccgatttactggcaatcacggcattaagtgggtgatttgcttcacatcttgggcattttcctgcaaaaccatacccttatgaaaagtgcggcattgataatcattttcaatatcatttaattaactataatgaaccaactgcttacgcggcattaacaatcggccgcccgacaacactggagatgaatatgagttataccctgccatccctgccgtatgcttacgatgccctggaaccgcacttcgataagcagaccatggaaatccaccacaccaaacaccatcagacttacgtcaacaacgccaacgcggcgctggaaaacctgccagaatttgccaacctgccggttgaagagctgatcaccaaactggaccagctgccagcagacaagaaaaccgtactgcgcaataacgctggtggtcacgctaaccacagtctgttctggaaaggtctgaaaaaaggcaccaccctgcagggcgacctgaaagcggctatcgaacgtgatttcggttccgttgataatttcaaagcagaatttgaaaaagcggcagcttcccgctttggttccggctgggcatggctggtgcaaaaaggcgataaactggcggtggtttctactgctaaccaggactctccactgatgggcgaagccatttctggcgcttccggcttcccgattctgggcctggatgtgtgggaacatgcttactatctgaaattccagaaccgccgtccggactacattaaagagttctggaacgtggtgaactgggacgaagcagcggcacgtttcgcggcgaaaaaataatcatttgccgcctgctgcaatgaggcgtttacgccgcattgcagcttaaaaaatgaaccatcgccaacggcggtggtttttttgtgatcaatttcaaaataaaaacaatgatccgataaaaataaaacagcgtttcaattggtgtggttttgatcacttttattgatcaaatgaatgtctatcttcgtttccatcaacactgatgctccgttgaggaatgacgcatcagcccttaaaaatatgccgacaggtgatggaaatgcagataaaacgctcgattgagaaaatcccgggggggatgatgctcgtcccgctattccttggcgcactgtgccacaccttctcgccgggggcggggaaatattttggatcattcaccaacgggatgattaccggtacggtgcccattctggcggtgtggtttttttgcatgggggcgtcaataaaattaagcgcgacgggaacggtactgcgtaaatccggtacgctggtggtaactaaaattgccgtcgcgtgggtggttgcggcaattgcctcgcgcattattccggaacatggtgttgaagttggattttttgccggactttcaacgttggcgctggtggcggcgatggatatgaccaacggcggactttacgcttccatcatgcagcagtacggcacaaaagaagaagctggggcatttgtgttgatgtcgttggagtccgggccgctcatgacgatgattattctgggcactgccgggattgcctcgtttgaaccgcatgttttcgtcggcgcagtattgccgttcctggtgggctttgccctggggaaccttgaccctgagttacgagaattttttagcaaagcggtgcagacgctgattccattctttgccttcgcactgggcaataccattgatttgactgtaattgcccagacaggtttgctggggatcctgttgggtgtggcagtaattatcgtgaccggtattccgttgattatcgccgataaattgattggcggtggcgatggcactgccggaattgccgcttccagttccgcaggggccgcggtagcgacacctgtgctgattgcagaaatggtgcctgcgtttaaacctatggctccggcagcaacttcgctggtagcgacggcggtcattgtgacttcgattctggtgccaattcttacctctatctggtcacgtaaagtcaaagccagagcggcgaaaatcgaaattttaggtacggtgaaataaaccaacttccttaatccccacagccggatgaactaacgttcgtccggttttcaattgcgtttctgcctggatacttaccgcgaaaacagcacgcctgacataaaataaatatggtctaatggggaaatttctcgtggagagggaacagatgcgatatccggttgatgtatacacaggcaagattcaggcttatcccgaaggcaaacccagcgcaattgccaaaatccaggttgatggtgagttgatgctgacggacctggggctggaaggtgacgaacaggcggagaaaaagatccacggcgggccagacagagcgctgtgtcattatcctcgtgagcattatctctactgggcgcgggaatttccggaacaggcggagctgtttgttgcgcctgcgtttggcgaaaatctctcaaccgacggtctgacggaaagtaatgtttatattggtgatattttccgctggggagaggcattaattcaggtcagccagccacgctcaccttgctataaactcaattaccattttgatatcagcgatatagcgcagttgatgcaaaacacgggtaaagtggggtggttgtatagcgtaattgcaccagggttggtatctgctgatgcgccactggagttggtttcccgtgtcagcgatgtgaccgtgcaggaggctgccgccatcgcatggcatatgccgtttgatgacgatcagtatcaccgtttactctccgccgcagggttatcgaaaagctggacgcgaacgatgcaaaagcgccgactgagcggcaagatcgaagatttttcccgccgattgtggggaaaataacccccggagtgtaggcctgataagacgctatcagcgtcgcatcaggcatcctgctcaaatgccggatgcggcgtaaacgccttatcctgcctacaaatgcggagtttaactccgcttatacagcggcaaccaaatcaccagccgtaaaccgcccagcgggctgtcttctgccttcacccagccacgatgctgctgaatggcggtttcaacaatcgccagccccaaacctgtaccgccagattcacgatcgcgtgcttcgtcggtccgatagaacggacggaaaatctgttcgcgatcttccgggctaacgccaggaccatcgtcgtccaccgtaatggtgataccgtctttatctaccgcaaagcccacttcaatcttcgtatgggaataacgcagagcattacgaacaatgttttccagcgcactttccagggcgttcgggttgccgtacagcggccacggcccaggtgggaagttaaccgtcaacgacttgcccatttgctcggcttcgaacgccgcgttatccagcacttcactccacaactggttggctttgatggtctcgctaaccagcgcatttttctgctgattacgtgacatcaccaacagatcgttgatcatgctgtccagacgttgcgcttcagtttcaatacgctccagttccttgctttcaccgctacgacggcgcagtaacgccgtacccagttgcagacgcgtcagcggggtgcgcagttcgtgagagatatcagaaagtagacgctgctgagaggtcatcatgcgctccagcgcggtgaccatctggttaaaactggcaccggcggcaaggaattcctgtggccccgcttccagttccgggtgctggcgtaagtttccctgggcaacttcatcggcagcgtttttcagcttacgcgccggttttgccagactccaggccaaccacaacagcagcggcgtactgaccagcatggtgacaatcagcagtaatagcgggcggtcaaacagtaagtttatgaaatcggattgagaactgctggccggacgaatcagataaagttggtaattatcttcgccatcacgcacggagaacggaccgaccagttccacgcggccatactttttcttctgcggatgatcggcgttatcggcctgaccaataaagttacgaatgatctgcatttcgctgcgttcagcgccgatcacgcggccttcggtggtcaccaataacaaacgctgtcctggcggtgcccacttatcaatcgcccggaacagacgccgccaccacattaaatcgttgggcggatcgttcgccagctccgcttcgacatgctgctcaatcatcagaccctgacgctgttcgctatccagaagctcggtcatctggcgtgaatcgagcttgggtaacatcaaaaccaacatcaacaccagcgccagcgtcagccagaagatggcgaagatgcgcgcggttaagctgcctatcatgaagcagaaaccatcagatagccgcgaccacgcagggttttaaaccacgggtgaccatctttacgatccggcagtttacgacgcaggttggaaatgtgcatatcgatagcgcggtcgaaaggcgtcaggcgcttgcccagcacttcctggcttaaatgctcacgggaaaccacctgacccagatgctgtgccagcaaatagagcagggtaaactcagtaccggttaactccagcgtttgcccgtcgaagctggcttcctggcgaccaggattgagacttaaggcatcaacttccagtgtcggtgaaccgttgtcgttgttttgctgttgttcgctccagtgcgaacggcgcaggatcgcgcgaatacgtgccaccagctcacgatcattaaacggtttcgggagatagtcatctgcgcccagctcaagcccgagaacgcgatcaagttcactgccgcgcgccgtcaacataatgacaggcgtctggtgtgtctggcgaagtgcttttaatgtgtcgataccatttttcttcggcatcattacatcaagcaaaagtaaatcaatgctgtcgtccagaagatcaagcgcctgttccccatcgtgggcaacaatcacgttgaagccttccatctcgagcagctcctttaatagggaagtcagctctcggtcatcatcaactaacaggattttattcattgtttaaatacctccgaggcagaaattacgtcatcagacgtcgctaatccatgactttacgttgttttacaccccctgacgcatgtttgcagcctgaatcgtaaactctctatcgttgaatcgcgacagaaagattttgggagcaaatgatgcgcatagttaccgctgccgtcatggcctcaacgctggcagtcagttcattaagccacgctgctgaagtcggttcaggcgataactggcatccgggtgaagaacttacgcagcgcagtacgcagagccatatgttcgacggcataagtttaaccgaacatcagcgtcagcagatgcgagatcttatgcaacaggcccggcacgaacagcctcctgttaatgttagcgaactggagacaatgcatcgccttgtcaccgcagaaaattttgatgaaaacgctgtgcgcgcacaggcagaaaaaatggcgaatgagcaaatagctcgtcaggttgagatggcaaaagtccgcaaccaaatgtatcgcctgttaacgccggagcagcaagcggttttaaacgagaaacatcaacaacgaatggagcagttgcgcgacgtgacgcaatggcaaaaaagttcatcgttgaagctattgagtagtagcaactcacgttcccagtagtaaaccctgttttccttgccatagacaccatccctgtcttcccccacatgatgtgggggttttttttatcctcaatttgcctgctgcttaatgcattgcagatgatttgcttccgttatactaccgtcagttgatagcgggagtatttatgaatcaatcttatggacggctggtcagtcgggcggcgattgctgcgacggcgatggcttcgctgctattgctgattaaaatttttgcatggtggtataccgggtcggtgagtattctcgccgcgctggtggattcgctggtggatatcggcgcgtcgttgacgaatttactggtggtgcgatattccctgcaacctgccgacgataatcactcgtttggtcacggtaaagctgagtccctcgcggcgctggcgcaaagtatgtttatctccggttcggcactattcctgtttttgacgggtattcaacatctggtatctccaacaccgatgacagatccaggcgtcggggttatcgtgacaattgtggcgctaatttgtacgattatccttgtctcgtttcagcgttgggtggtgcgccggacgcaaagccaggcggtgcgggctgatatgctacattaccagtctgatgttatgatgaacggcgcaattctgctggcgctggggttgtcctggtacggctggcatcgcgccgatgctctgtttgcattggggatcggcatctatattttatatagcgcgttacgcatgggatatgaggcggtacagtcattactggatcgcgcattgcctgatgaggaacggcaagaaattattgatatcgtgacttcctggccgggtgttagcggcgctcacgatcttcgcacgcggcagtcagggccgacccgctttattcagattcatttggaaatggaagactctctgcctttggttcaggcacatatggtggcggatcaggtagagcaggctattttacggcgttttccgggatcggatgtgattatccatcaggacccctgttccgtcgtacccagggagggtaaacggtctatgctttcataatcagtataaaagagagccagacccgcattttgtgtataaaataccgccatttggcctgacctgaatcaattcagcaggaagtgattgttatactatttgcacattcgttggatcacttcgatgtgcaagaagacttccggcaacagatttcattttgcattccaaagttcagaggtagtcatgattaagaaaatcggtgtgttgacaagcggcggtgatgcgccaggcatgaacgccgcaattcgcggggttgttcgttctgcgctgacagaaggtctggaagtaatgggcatttatgacggctatctgggtctgtatgaagaccgtatggtacagctagaccgttacagcgtttctgacatgatcaaccgtggtggtacgttcctcggttctgcgcgtttcccggaattccgcgacgagaacatccgcgccgtggctatcgaaaacctgaaaaaacgtgggatcgacgcgctggtggttatcggcggtgacggttcctacatgggtgcaatgcgtctgaccgaaatgggcttcccgtgcatcggcctgccgggcactatcgacaacgacatcaaaggcactgactacactatcggtttcttcactgcgctgagcaccgttgtagaagcgatcgaccgtctgcgtgacacctcttcttctcaccagcgtatttccgtggtggaagtgatgggccgttattgtggcgatctgacgttggctgcggctattgccggcggctgtgaattcgttgtggttccggaagttgaattcagccgtgaagacctggtaaacgaaatcaaagcgggtatcgcgaaaggtaaaaaacacgcgatcgtggcgattaccgaacatatgtgtgatgttgacgaactggcgcatttcatcgagaaagaaaccggtcgtgaaacccgcgcaactgtgctgggccacatccagcgcggtggttctccggtgccttacgaccgtattctggcttcccgtatgggcgcttacgctatcgagctgctgctggcaggttacggtggtcgttgcgtaggtatccagaacgaacagctggttcaccacgacatcatcgacgctatcgaaaacatgaagcgtccgttcaaaggcgactggctggactgcgcgaaaaaactgtattaatgatttcggaaaaaggcagattcctttagcctgaaaccgatgacagaagcaaaaaggcctgatgcgcttcgcttatcaggcctacatgaattctgtaatctattgaatttgcaaacttttgtaggccggataaggcgtttgtgccgcatccggcatggacaaagcgcactttgtcagcaatatgaggcggatttcttccgcctttttaatcccccaacatatactcgcaagttatagccaatctttttttattctttaatgtttggtcaaccttctggcacgctttgctcatcacaacacaacataagagagtcgggcgatgaaaaagtggggcgtagggttaacatttttgctggcggcaaccagcgttatggcaaaggatattcagcttcttaacgtttcatatgatccaacgcgcgaattgtacgaacagtacaacaaggcattcagcgcccactggaaacagcaaactggcgataacgtggtgattcgtcagtcacacggtggttcaggcaaacaagcgacgtcggtaatcaacggtattgaagctgatgttgtcactctggctctggcctatgacgtggacgcaattgcggaacgcgggcggattgataaagagtggatcaaacgtctgccggataattccgcaccgtacacttccaccattgttttcctggtacgtaagggtaatccgaagcagatccatgactggaacgatctgattaaaccgggtgtttcggtgatcacgcctaatccgaaaagctctggtggcgcgcgctggaattacctggcagcctggggctacgcgctgcatcacaacaacaacgatcaggcaaaagcacaggattttgttcgggcactgtataaaaacgtcgaagttctggattctggcgcgcgcggatccactaacacttttgtcgagcgcggaattggcgatgtactgattgcctgggaaaatgaagctctgctggcagcgaatgaactggggaaagataaattcgaaatcgtcacgccgagtgagtctatcctcgcagagccaaccgtgtcggtggtcaataaagtggtcgagaaaaaaggcaccaaagaggtggcggaagcctacctgaaatatctctactcgccagaaggtcaggaaattgcagcgaaaaactactaccgtccgcgcgacgctgaggtagcgaaaaagtacgaaaatgcgtttccaaaattgaagttattcaccattgatgaagagttcggcggctggacgaaagcgcaaaaagagcattttgctaacggcggtacgttcgatcagatcagcaaacgctgatttccccaggataattatcaagcccggtggtttctcgcgactgggttttttatttgtcacgattttgcgttacccttgcatctctttgaggtacagggaaaaaaagatgaaaaaagcgggtcttctttttttggtgatgatagttatcgccgttgtggctgccggtattggttactggaaattaaccggtgaagagtcagacacgttacgtaagattgttcttgagcaatgtttgcccaaccagcaggaaaaccaaaacccgtcgccatgtgcggaagtcaaacccaacgccggatacgtggttttaaaagatcgtcatggcccactgcaatatctgttgatgccaacgtaccgtattaacggtactgaaagcccattgttgaccgatccgtcaacgcctaattttttctggttagcctggcaggcgcgtgattttatgagccaaaaatacggccagcctgttcccgatcgcgcggtatctctggcgatcaactcccgcaccgggcgtacgcaaaaccattttcatattcatatttcttgtattcgtcctgatgtgcgcgaacagctggataacaatctggcgaacatcagtagccgctggttgccactgccaggtggtttgcgtgggcatgagtacctggcgcgtcgggtaacggaaagcgaactggtacaacgcagcccatttatgatgctggcggaagaagtgcctgaggcgcgggaacatatgggaagctacgggctggcgatggtacggcagagtgataactcatttgtattgctggcgacacaacgaaatctactgacgctgaaccgtgcttcagccgaagaaatccaggatcatcagtgtgagattttgcgttaaggcgaggagtttaggaaagtaagtgccggatatgaaatccggcacctgtcagacttaagcctgtttagccgcttctgcagctttaacgatcacggcgaaagcgtcagctttcagagaagcaccgccaaccagcgcgccgtcgatgtctggctgagcaaacagttctgcagcgttagacgcgtttacagagccgccgtactgaatgatcacttgttcagcgatgttagcgtcaactttagcaatgtggtcacggatgaatttgtgaacagcctgtgcctgagccggagttgcagatttgccagtaccgattgcccatacaggttcgtaagcgataaccgcaccttcgaatgccgcagcaccctgagttttcagtaccgcgtcgatctgacgtgcacaaacttcttcagttttgcccgcttcgttttccgcttcggtttcaccgatgcacagaaccggagtcagtccctgctctttcagcaccgcgaattttttcgcgatcagttcgtcagattctttgtggtaagtacgacgttcagagtggccgatgatgatgtactgtgcgccgatgtctttcagcatagcagcagaggtttcaccggtgaatgcgccggacaggttcaggtccacgttttgcgcacccagcatgatgtggctgccttcagcttcacgcttcgccatatcgatgtacatttccggtggtgcgattgcaaccgcacagccagcaacacctgccagctctttacgcaggttagataccagctcgtgaaccatgtggcggctgccgttcagtttccagttacccatcactaaaggatgtcgcattttaattctccacgcttataagcgaataaaggaagatggccgccccgcagggcagcaggtctgtgaaacagtatagagattcatcggcacaaaggctttgctttttgtcatttattcaaaccttcaagcgattcagatagcgccagcttaatcggttcaacagcgaaggtcagccccttttcgccgttgtccgcgacaacataacgcagtgcaccttctgtctcggtgtaataacgtttgtttttccccgccgttagtagcgactgcagttttttctgactttgagttttggtcattaatggggtgagtgtgcggatcaccgctgccatgtatgcctgagctttcgctttcgcggctttttgctctggcccctggatgggtagccaggttatttgaatgcttttgatttttaaggtaccgcgctccagcgcagtagaagcatacaagttctcgttaattttacttgctgcacgagtgagattggctttgtcgggactgctgtcgatggcacgaaattcgttcagtggcaggctgggattctggctgttaaagtcttctcgaaactggctgatggagagatcgaaagtaggggctccagccagcagataaggcgcggtcgttgccgtatctggtgtttgtgcatgcgccgttgttgtaacggttaatgcagaacataagagaaaaaacagcgtacaccctggcttcattgacagtaccttttgttatgactggctccgattaaaacgatatctgtcgcccttgtcaaaagggtagaatcctggaaaagacaaccatcaaggaacttacatgaccatacagcaatggttattctcatttaaagggcgtattggacgccgtgatttctggatttggataggcctgtggttcgcaggcatgctggtgcttttctcactggcgggtaaaaatttactcgatattcagaccgcggcgttttgccttgtgtgctcgctttggccaacagcggcagtaaccgttaagcgcttgcatgatcgcgggcgttccggcgcatgggcatttctgatgattgtggcgtggatgctgctggcgggtaactgggcgattttaccgggtgtctggcaatgggcggtggggcgttttgtcccgacgttgattctggtgatgatgcttatcgatcttggtgcgtttgttggcacacaaggcgaaaataaatatggtaaagatacccaggatgtgaagtataaagccgacaataaatcaagtaattaacctttaatatatctcttatcgctatttttttccgggattgttatttccacgatgcaagtgacaatgcccggaaaatccttctgaactcttcaccttaagcaatatcaaaaaaaatggtaatccataagatcattacttgtttgttcttcctttaacggcgcattattcttaagtcgtaatcgacagagaggcgaatatacagaggtgccctatgaaagatgtcgtagataaatgcagtactaaaggatgtgcgattgatatcggtacggtgattgataacgacaactgtaccagtaagttttcgcgcttttttgccacccgcgaagaagcagagtcctttatgaccaaactgaaagagcttgccgccgctgcatcctctgcagatgaaggggccagcgtggcctataagattaaggatctggaagggcaagttgagcttgatgcggccttcaccttctcatgccaggccgagatgattatttttgagttatcactgcgttcgttagcttgatggagttgctttagaaggagttaaatatggcttataaacacattggcgtggcaatttccgggaatgaagaagatgccttactggtgaataaagccctggagctcgccagacataatgacgctcacctgacgttaattcatattgatgatggcttaagcgagttgtatccgggtatctacttccctgcaacagaagatattcttcaattgttgaagaataagtcggataacaagctgtataaactgacgaaaaatattcaatggccgaagacaaaactgcgtattgaacgcggagaaatgccggaaacactgctggaaattatgcaaaaagagcagtgcgacctccttgtctgtggtcatcaccactcatttatcaaccgtttgatgccggcatatcgcgggatgatcaataagttgagtgcggatctcttgatcgtgccgtttatcgacaagtaaccgcttaccagtaatgctccgctgtcatatggcccggtcggcgacgtaaatgtttcgtcatctgccgggtctccttcagcaactgttgtgtatcgcgcaccatctgtggattgccgcacagcatcacatggctggtttctttattcatcggcaggccaaccgcgctttccagttcaccactttcaattaacgccggtaatcgcccagtgagcgaacccgcagccgtttcccgactgaccaccgtctgaatgcgcagtttcccctcgtagcgtttttccagttcctgcatcagaggtagatagcttaagtcggcggcatatcgtgcggcgtgaaccagcaccatgtttttgaagcgttctaaatctttgcccaattgcagaatcgataaataagggccaatcgctgtaccggttgccagcatccatagcgtttcgcaatctggtacttcatccagcacaaagaagccagcggcttcgctaaccacctgcacttcatcgcccggtttcagtgccgccagtcgtggacttaatttgccatcggggacggtgaccaggtaaaactccagatccggattatcgggcgagttaacataggagtaggcgcgctgaacgcgttcgccttcaatttcaaggccaagtttggtgaattgcccggcggtaaacggaagcacgggagcgtgaacggtgagactaaacagggcgtcggtccagttctgcactttagtgactttgcctgttacccaatcagccatgtttttctcctgttttgattgacttgccttatcttcgttctccgaacaaaaaaattccagtcccgaaggactggaaggctcaatcgatcaaatcaatcagaggatgtgcacctgcatttccgggtctttacgatccagatagtggatggactgaatgcgacgaatggtgcgtgatttaccacggatcagcagcgtttcggtggtggcgatattgcctttgcggctaataccttccagcagatcgcctttggtaataccggtggcagagaagatgacgttgtcgctgcgcgccatatcgcccaaacgcaatactttaccggcttcgatgcccatcgctttgcagcgtgccagctcctgctcgccaatgcgacgattctcttcgttgtcgcctttgacgtcatgacgcgccagcagacgaccgttcatgtcaccatctaatgcgcggatcaccgccgcagaaaccacgccttccggcgcgccgccaatgccgtacagtacatcgacttcactgtccggcatacaggtgagaattgaggccgccacatcgccatccggaatagcaaatacgcgtacgccgagttgttgcatttctgcgataacggcatcgtggcgcggttttgccagaatcgttaccgtcagttcgctcaacggtttgccgagcgccgccgcaacattgcgcaggttatccgccagcggcaggttcagatcaatggtgcctttggctcccggtccgacgatcagcttctccatatacatatctggcgcgttgaggaaacagcctttatcgcctactgccagcaccgccagcgcgttagcctggcccatcgccgtcatgcgcgtgccttcaatcggatcaacagcaatatctaccgcgtcgccgcgaccagtaccgactttttcaccaatgtagagcatcggtgcttcgtcgatttcaccttcaccaatgacgatggtgccgtcaatgttgacctggttgagcataatacgcatggcgtttaccgccgcgccgtccgcggtgtttttatcgccgcgtcctaaccatttgtagccagccagcgctgctgattcggtgacgcgggaaaattcgatggcaagttctcgtctcatagcaaactctaagcagtaaggaatggcgcgaagtgtagcacaggggaagggcgggattattgatgtgtgcggggttgcccccgcacggtttcagagtctgtgtgatgccggatgtgtatccgactcgtaggcctgataagacgcgcaagcgtcgcatcaggcaatcattattactcgtcgtgttcttcccatgccatcgcgcgtttgaccgcttttttccagcctgcgtaacggtaattacgctcagtggtttcgatgccaggacggaactcgcgttcaatcaccgctttctcttgcagctcgtcaagattctgccagaagccaaccgccagaccagcaagataggccgcacccaaagcggtgacttcgcgcacttccgggcgctcaacgcgcgtaccgagaatatcggactggaactgcatcaggaaattgtttgccaccgcaccgccgtccacgcgcagcgcgtgcagacgaataccggagtcggcctgcattgcttccagcacgtcacgcgtctgataagcaatagactccagcgtcgcgcgtataatgtggttagcgttcaccccacgagtcagaccgaaaatcgccccgcgtgcatacggatcccagtatggcgcacccagcccggtaaaggccggaaccacatacacaccattggtgttttgcactttggtggcgaaatattcggaatcgtaggcgtcgttaatcaacttcatctcatcgcgcagccactgaatggacgcgcccgccataaacactgcaccttccagcgcatagttcacttcgccagtcgggccgcaggcgatggtggtcagcaggccgttttctgattttaccgctttctcgccagtgttcatcagcataaagcagccagtgccataggtgttcttcgccattccttctttcacgcacaactgaccaaacagcgccgcctgctggtcaccggcgatcccggagattggaatacgcgtgccgcctttgccgccaatgttagtctgaccgtatacttcggaagaacgacgcacttctggcagcatctcgcgtggaatatccagcacctccagcattttgtcgtcccagtccagactatggatgttaaacaacatggtacgagaggcgttggtgtaatcggtcacatggacacggccctgagtcattttccagataagccacgtatcaaccgtaccaaacagcaattcaccacgacgcgcacgctcgcgagagccttccacatggtcgaggatccacttcactttggtgccagagaagtacgggtcaatcaccagaccggtgttgttacgaatgtactcttccatgccatcgcgtttgagatgttcgcagatttctgcggtacgacggcactgccagacaatggcgttatagataggcttgccggtttctttttcccagacaatagtggtttcacgctggttcgtaataccgatagctgcaatctgatcggaactgatatcggctttcgccagcacttctaccagcgtggagctttgggtggcccagatttccattgggtcgtgttctacccagcctggttttgggtagatttgctcaaattcgcgctgcgacacgctaatgatattggcatcgtgatccattacgaccgcgcgggagctggtggtgccctggtcgagcgcaacgatatattttttttcagtcatgtttaattgtcccgtagtcatattacagcgaagctttttgttctgaaggagttgtggtctccttttcttccacaacacagatatcgcaaggcaaatggcgaccaatcagtttgcggtaggcaaatgcacctacaatcgcgccaacgatagggccaaaaagcggcaccaggaagtaaggaatgtctctgccgccggtaaaggcgacattgccccagcccgccagccaggcaaagactttcggaccgaagtcacgcgctgggttcatggcaaaacccgtcaatgggcccatagatgcgccaatgaccgcaatcagtagaccaatcagcaagggagccaaagggccgcgtggtacaccgttgccatcgtccgttaacgccaggatcagccccatcagaatagcggtaatcaccatctcaactgcgaaagcctgcacaaaattgatatgaggattagggtaagtagagaaagtgccagccagatcaacactttcaacgctgccgcgaacaatgtgatgagtctgctcgaagtcgaaaaataaattgtagtaaagcccgtaaactaaagccgcagcacagaaagcgccggcaacttgtgaaacgataaaaggaataactttgcgcttgtcgaaacaggcaaacagccacaatgcaatggtaacagcgggattaagatgcgcgccggaaacccctgcggtcaggtagatggccattgccacccccagtccccaaatgacactgatttcccactgaccaaaagacgcaccagcgacttttagtgctgcaacgcaacccacaccgaaaaaaatcaacaacccggtaccgaggaattcagcaatgcactggcctttcaaggttgatgtttgactcataatcggatcctgaagagttaatgtttgttgtatgcgtgaaagtcacggacctccacgatgcttgtaggcatgctgtaaacttatcgttaacgagcaaaaacgagaaatatcgaacttaaaatgtgtgtgcttcgtcataaaatgagcgttatcgcgccatttattccatctgattgtacatgatgcatgtttgttagatcattcgcgcaacaaatttattaacattttcgattggtgtggattatgtcaccaggagaaggatgaaaagtgtggcaaaccgtaatctgcaaggcgtgccgctggacagcgatggcgcggcttcatacaatcggagctaactaaagtgcgctcgtatttattaaggcgtcaccggtaatcgggacgaggatttttatccatcaacgccttgcaattcaggagaggtatgacaatgtcattagaagtgtttgagaaactggaagcaaaagtacagcaggcgattgataccatcactctgttgcagatggaaatcgaagagctgaaagaaaaaaacaactcactgtcgcaggaagttcaaaatgcccagcatcagcgcgaagagctggagcgtgagaacaaccatctgaaagaacagcagaacggctggcaggaacgtctgcaggccctgctgggtcgcatggaagaggtctgattacacttcatctttcgcgtaatttctttactgtgtaggccaacaggtaacgcagaaaaaaggcaccttgcggtgccttttttatcattcaatatccagcggatcttctgaaagaataatcccggtattgtcggcataaagatggtcgccggagaagaaggtgacaccgccaaaattgacgcggacatcgctttcgccaatgccttcgccagcggcaccaaccggaattgccgccatcgcctggatgccgatatccaactcttccaggtcatctacctgacgcaccgcgccgtaaatgaccagaccttcccattcattttgtactgccagacgcgccagttcagcatcgaccagtgcgcgacgaacagaacctccgccatcgacgacaagaacacgaccacggccattctgttcgagcagatcgtacagcaacccgttgtcctcgaaacattttaccgtgattatttgtccgccaaacgacgcccgtccgccaaagttggagaacagcggttccacgacgttaacatcttcttgatagatgtcacaaagctcggaagtatcgtatttcataggcttaacattcagttgctgcgagaattttcagtatatcgcgctatgtgggctgttggcaaaatcatcaattgttaattgatatttgtcagttatgctgcccactggcttaggaatatccctaaaacaaacagcaggttagtcagtaacgctcctttgacagtgcgttccagcattggtcgcatcgccaccgggtccatttcgcgcatcacataacgagcttgcttcaccagcaacggtgccgccagcaggaacagccagccccacaggctatgcagcgaaaagagattaaacagcgccagacacaccagagagcccatcagcaggcaggcatgataacgacgcgcgtttactgcgcctaagcgcaccaccagcgtgtttttgccgttttcgcggtcgctattgatatcacgcaggttattaatgttcagtactgccgttgccagcaggccgcatgcggttgccggaaggatcagtgccggaatcaatgtatgagcctgtaaataccagctccccatgacgctcaaccagccaaagaaaaccagtacggaaatatcacccaaaccgatataaccataaggacgattgcccacggtgtaggtgatagcggcaatgatcgacaacccgccaagaatcaggaaaccgacaaaatcggccagcgtatggcacgccactgcaaccagtgccagcccggaaagacagatgagcacaacggtaataatgagcgcccgtttcatctcttgctgggtaatgacccctttttgcatgccgcgtagcggcccaatgcggtcaggtttatcgctgccttttaccgcatcgccgtaatcattggcgaggttagaaaggatctgtaatagcccggcggtaatcaatgccagcagggcgaccagtggatcgaagtgaccttgccaccatgccagcgccgtcccgacgataattgcagcaaaggcgagggggagggttttaggtcgtaaactttccagccacgcctgagttcggctaatttgttgttcagtcataatacgcgccaataaaaatggggcctttcagccccatcaaacaatgatgaaaatgattgaacgcgattataggataaaacggctcagatcttcatctgccaccaacgcatccagatgtttgctcacataatctgcgtcaatagtgatagtttgaccgcttaaatcgctggcgtcgtaggaaatctcttccattaaacgctccagaacggtatgtaaacgacgagcaccgatgttttcggtagattcgttcacctgccatgccgcttccgcgatgcgcttaataccggagtcggtaaactcgatatttacgccttcagttgccatcagtgctttgtactgcacagtgatagaggcattcggctcggtcagaatacgctcgaagtcgctggtggtcagtgcctgcagctcaacgcggattggcagacgaccttgcagttccgggatcaggtcagacggtttcgcaatctggaacgcgccagaagcgataaacagaatgtggtcagttttgaccatcccatgtttggtggaaacagtgcaaccttctaccagcggcagcaggtcacgctgaacgccttcacgagaaacatctggaccggaagactcgccgcgcttacagattttgtcgatttcgtcgataaacacgatcccgtgctgctcaacagcgtcgatagcatcttgcttcagctcttccgggttcaccagtttcgccgcttcttcttcaatcagcagcttcatggcgtctttgattttcagcttacgcgctttttgtttctgaccgcccaggttctggaacatggactgcagctggctggtcatctcttccatgcccggaggagccataatttcaacgcccatcggtgctgcggcaagatcgatctcgatttctttgtcatcaagctggccttcacgcagttttttgcggaatgcctgacgagcagcggacggttcctgctgctgttcggtctgtccccagttatttttagccggtgggatcagtacgtcgagaatacgttcttctgccagttcttcagcgcgataacggtttttctcgatagcctggacgcgtaccattttcacggcggcatcggtcagatcgcgaataatagaatccacttccttaccgacatagcccacttcggtgaatttggtcgcttcaactttgatgaacggcgcattcgccagcttagccaggcgacgggcgatttcagttttaccgacaccggtcgggccgatcatcaggatatttttcggggtcacttcatggcgcagctcttcgttgagctgcatgcgacgccagcggttacgcagagcaatcgccacagaacgcttggcgttgtcctggccgatgatgtgcttatccagttcgctgacgatttcgcgtggggtcatttcagacatgggagatccttacgctttgtagcttaattcttcgatggtgtggaaatggttggtatagatgcaaatgtcgcctgcaatatccaacgccttttcagcaatttcacgggcgctaagttcagtgttttctaacagcgcgcgcgccgcagcctgggcgtaagggccgccggagccgatagcaataagatcgttttctggctgcaccacgtcaccgttaccggtgatgataagcgatgcagtttcatccgcgactgccagcagtgcttcaagtttgcgcagcatgcgatcggtacgccagtctttcgccagctcaacggcggctttgaccagatggccctgatgcatttccagtttacgttcaaacagttcgaacagcgtaaaagcatccgcagtaccgcccgcaaagcccgcgatgactttgtcgttgtacagacggcggacctttttcacgttgcctttcattacggtattgcccaacgtggcctgaccatcaccagcgatgaccacatggccgttacggcgtacgcttactatagttgtcacgagctgaccccttggttacgaatacagagtacaaaccccgtacaaaagtacggggcataatgcaattatagatgggggggattttgagggtttcaacccccggcggcgagccgaatgcagtttgtatgacccgccatcttcaagcgattgagggtgctgtctgcgttctctttgcctttcaccgggccaatcaccacacgattccagccattgttggtggtaatttttgagtcaaagccttcgaacgccagctgagcacgtaccgtctctgcctgttccgcgcctctgaacgaaccgcactgcaccatccagcggcgttcgtcttttttctccgccgtcggttttggcgcgtcagcgacacgagcaaccggcgcagcttgctgcggcttcgactgcgcggtcgtgtgcgcaggggtttgcagcagatcctggtacggctgctgagtagaagccggtttagactggcgcggttgcgcctgtaccggcgcggcttgcgacgtacgcgtctgctgctgccagctttgttcagtcgtacgcgactgctgaaccaggcgttgctgctccgctaattgctgcgcctgacgctggcgctgtagcgtttgctgacgctgttccggcgtctgttcattccacggaacttcaaccagctgcgttggctgctggcgcatatcagcctgcatttgctcaagaagctggcgttgttctggtgtcagttgctccggcgttttcacttcaccaccggcagaaggttctgtaggcgcacgcacacccggctggcgactttccagctctttgatgtagcgccagcgttcttctggttttggtggtagtccgtttccggtcactttctggctttgcagcgtctcggactcttctttcttgtgatgcgtaatgaagtacagaccaccgataaaggtcacaagaacggcggcagcaatagcgaccatagcgggagaaaccgcaggcagatttcgttgctttttccgtgaggtgctcttttttcgccgcgaaggtgccggttggctgcggcgtacataatctcgttgtgccactatcgtttcgctgtatttattcgttcgtcagcccgccatgttacttaagcggcgggcctttgaccagtcacggcagtcttaaaggtttactttaaggtaacgcgcgtgttgatccccggatgataagttcgcagtccattaaacgagagccactgccaacgtgttgcccctgcatttgatcaagcaataacagcatagcttcccgaccgatttcgtaacgcggctgcgcgatggttgtcagcggcggatcacaaaattgcgtcaggtcgatgttatcaaaaccgattatggaaaggtcttccgggactttcagcccctggcgttttgcctgagaaagtgcgccgagcgccatcacatcgctatggcagaagacagcagtaggcggttgtggaagatcaagcaactgctgcatcgctttgcttccggcttcgaaggtgaagtcgccacgggcgatgtattgcggatcaaccataatgccgcagcgacgcagcgcctgaacgtagccttgcaggcggtagtgacacagcggcatctcttcgggaccggctatacagccaatccgtttatgcccttgctcatatagataatttactgcatcaaatgcggcggtcagattgtctatatgaactgtaggtagctccagttccggtgcaaattcgttcgccatcaccatcggcggcagattacgctgttcctcaatgctggcatcaaacggcagccttgaacccagcagcaacatgccatcaatttgcttggtgatgatcaaatcgataaaggttttttcctgctgattttgatgcgcacagtcgccaatcagcaccagatatccgtgatttgccgccgtaacttcgataccgcgaataatttcgctaaagaaagggtcgcagatatccgggacaatcaccagaatagtgcgggattcattacgcttgacgttgcgccccataggctgtggtaaataacccacttcccgggccgctttttcaacccgattacgagtggcctgggagactttatcgggattcattaatgctcgggagacggtcgctgtagagacttttgccttgagggcaacgtctttcatggtcgcggcagtttcctgcttcttcgctttcacactcactcctcgcctggcacgtcaggcgtactacatccatgtttacttcacatcggcaacatttttagcagatagcgcgtgaaaacggttacagaattttcatgaaaagtgtgatgaatattgaatttttcgatccgcctcgcatcgtgagcggtttaaccctcaatcggatcgacatccagcacccatttcaccttgcgggaatccggtattgtattaataagcgccagcgtaccattgatgatgtgctgtaagcgcacgcgggaagggtgctgcaacaatatctgccagcgccagcgaccgccacgtttaggggccagcgccggaaccggaccgagaacccacagtttctcgtctgccagtgggctggcgagaatgagattacgcagttgttgcaggaacaatggcgcgtgctgattgttatgatcttccgcacgcacaatcacatggctggtccacggcggcagctgcatcatgcgtcgttcagccagtgcctgttcggcaaaggcgtcgtagcctttatagagcaatgtttgcaacagaggatgttccggatggtgcgtttgcagcaccacttcgccctgtttacccgcacgcccggcacgaccggcgacctgggtgtaaagctgggcgaaacgttctgccgagcgaaaatcggcagaaaacagcgcgccgtccacatccagtaacgccaccagcgtcacatccggaaagtggtgacctttcgccagcatttgcgtgccaatcaagatcctcgcgccgccgcgatgcacttccgccagttgctgttccagcgcccctttgcggctggtggtatcgcggtcgatacgagaaatggggacaccagggaacaacggcgcgagcgtctgttcaagctgttcggtgcccagccccacgggtaccaggtgcgtggaaccgcaagaagggcactggcgcggcaccggacgctgactgtcgcaatggtggcagcgcaaatgctgttgcgcctgatgcagcgtgtagtagtgatcgcaacgtgggcattcggctatccagccgcagtcgtggcacagcagcgcaggcgcaaaaccccgacgattaagaaagaggataacctgattgttggcctgtaaatgctggcgcatacgggtgattaacgccggagccagacctgcctgcaccttctgaccttttaaatccagcacatgttgaattgccgggcgcgcattgcccgcccgacgggtcaggcgcagcaggcggtattttttctgctgcacgttgcataacgtttccagtgcgggcgttgcggagccaagaataattgggatttgctcgctatgcgcgcgatacaccgccaggtcgcgggcatgatagcgccagccttcctgctgcttgtaggagctgtcgtgctcttcatcaataacaatcacgccgagatttttaaacggcgtaaacagcgcggagcgggtgccgatgacaatcgccgcctcgccatttttcgctttcaaccacgccgaaagacgctcgctgtcgttcaggccggaatgcagaacttccaccggggcattaaaacgttcacgaaaacgggcgatagtttgcggtgtcaggccgatttccggcaccatcaccagcgcctgtttgccctgagcgagcacgttttccagtacactgagataaacctccgttttaccggaaccggtaacgcccgccagcagccaggcagaaaaagtatctgccgcgctatgaattgcgccaacggcggtggcctgttcggtattcaaccgcaaccgctcaccagaaacggcatagttcgttcgccagtcgctaaactctggtgtttcacttgctaaatcacacagaccttttttgcgcagtgcctgcaacgcggcatcattaaattcaagttccgcgacctgatcacgccagattttgccttgccgtaacgctgccagcgcctgttgttgctttggcgaacgtttcaggctgttcagatccaccgcctgaccttgttcagtggcaaaccagtaccacatcggcgcgttcgccgcaggccgcccctggcgcagtaaaatcggcaaggcatgaaacagcacatcgccaatcggatgatgatagtaatctgccgcccagagcagtaatcgccagacagagtgagtaaataccggctcaacgtccagcacttcaactaccgctttcagctcgttaagcggcagctcactgacatcgctcactgacaccacaacaccgatacgctcctgttgtttgccaaacggcacgcgcacgcgactcccggctttaaccgtcatgccttctggcagcagatagtcaaaggtacgaggaagcggaacgggcaaggcaacgtgggcaacgggcatagcatcatcctgacttgaaattcggtgggttagtatacacattgccgtagaagagtgcggatcagtttgcatacgctggttaatttctgtatgatttcgcgccttcgtacgaaatgatcgtattgaagctatacttttaacatcgcgtggtgtctggcgttagggctggaagagcgacgcggccttaaaccgaggttttcccatgaaaaaagatattcacccgaaatacgaagaaattactgctagctgctcttgcggtaacgtaatgaaaatccgctccaccgttggtcatgacctgaacctcgacgtgtgcagcaagtgccacccgttcttcactggcaaacagcgtgatgttgctaccggtggccgtgttgaccgcttcaacaagcgtttcaacatcccgggcagcaaataagaccggatttccgaaaaaagcgccgcacggcgctttttttgtgcctgaattttggtcgtattaccaggaaaacagcggccattctttggcgaccgtggtgagttgtggcgcatcgaaaacggcttgtggcgagaccaccgtttcctcaagcggaatatttttcccgtaacgttctttgagtttcgcctgaaccagcgggttactaagatcgaactctttcaacttctgctgttcacctacgcgcatccccagcgcgttctgataaaccttccacaccacttccgaacagtactggcgatcgtcgctccacgagaagctgaaatcgtacggtttgccgagataacgttttgccgtttgcgccagtttttgctgttgttcggtattcagtccaccttcaacgcggcgaacaatgtatttgccatcttcaccgtgggcgatccactgcttgagcggggtgtattttaccgggccggccgcttcaaaaacgtagggctttttgttgcgtatcaccagcataccggtgtggctgtaatcggaatgggtcgccagttggatcgctttactttgcgatgagcgagagatctgaaagatgatgtcgccggtttgtggttgccaggcaaatgcaggcacagaaaccagcaggctgagaatcagtagcctgattttcatcgttaaacgtccatgtatgaaaaaagcggctggttaactccgcgccgctcttttccgctttagtattcccacgtctccgggttaatccccatctcacgcatgatctcttttgccgcctccggaatttcgtcgctgcgctctttacgcaggtcggcatcatccggcaaaggttgcccggtaaaggcatgcagaaacgcttcgcacagcagctcgctgttggtcgcgtgacgcaggttgttcacctgacgacgcgtgcgttcatcggtgaggatttttaacaccttaagaggaatggaaaccgtaatttttttgacttgttcactcttcttgccgtgctcagcgtatgggctgatatattcgccgctccattcagccatgagatacttaatcctcttcgtcaataaattgaggccagaccacacaattaatatgggtactgaccgtaaacccgcatagtttaccgtacaggcgttaccgtgacatcgtgtaatgcacctgtcggcgtgataatgcatataattttaacggctatttgagatttgctcaatctatacgcaaagaagtttagatgtccagatgtattgacgtccattaacacaatgtttactctggtgcctgacatttcaccgaccaagcccagggaacttcatcacatgacgcgtaaacaggccaccatcgcagtgcgtagcgggttaaatgacgacgaacagtatggttgcgttgtccctcccatccatctttccagtacctataactttaccggatttaatgaaccgcgcgcgcatgattactcgcggcgcggcaacccaacgcgcgatgtggttcagcgagcgctggcagaactggaaggcggtgctggtgcagtacttactaataccggcatgtccgcgattcacctggtaacgaccgtctttttgaaacctggcgatcnnnnnnnnnnnnnnnnnnnnnnnnnnnnnnnnnnnnnnnnnnnnnnnnnnnnnnnnnnnnnnnnnnnnnnnnnnnnnnnnnnnnnnnnnnnnnnnnnnnnnnnnnnnnnnnnnnnnnnnnnnnnnnnnnnnnnnnnnnnnnnnnnnnnnnnnnnnnnnnnnnnnnnnnnnnnnnnnnnnnnnnnnnnnnnnnnnnnnnnnnnnnnnnnnnnnnnnnnnnnnnnnnnnnnnnnnnnnnnnnnnnnnnnnnnnnnnnnnnnnnnnnnnnnnnnnnnnnnnnnnnnnnnnnnnnnnnnnnnnnnnnnnnnnnnnnnnnnnnnnnnnnnnnnnnnnnnnnnnnnnnnnnnnnnnnnnnnnnnnnnnnnnnnnnnnnnnnnnnnnnnnnnnnnnnnnnnnnnnnnnnnnnnnnnnnnnnnnnnnnnnnnnnnnnnnnnnnnnnnnnnnnnnnnnnnnnnnnnnnnnnnnnnnnnnnnnnnnnnnnnnnnnnnnnnnnnnnnnnnnnnnnnnnnnnnnnnnnnnnnnnnnnnnnnnnnnnnnnnnnnnnnnnnnnnnnnnnnnnnnnnnnnnnnnnnnnnnnnnnnnnnnnnnnnnnnnnnnnnnnnnnnnnnnnnnnnnnnnnnnnnnnnnnnnnnnnnnnnnnnnnnnnnnnnnnnnnnnnnnnnnnnnnnnnnnnnnnnnnnnnnnnnnnnnnnnnnnnnnnnnnnnnnnnnnnnnnnnnnnnnnnnnnnnnnnnnnnnnnnnnnnnnnnnnnnnnnnnnnnnnnnnnnnnnnnnnnnnnnnnnnnnnnnnnnnnnnnnnnnnnnnnnnnnnnnnnnnnnnnnnnnnnnnnnnnnnnnnnnnnnnnnnnnnnnnnnnnnnnnnnnnnnnnnnnnnnnnnnnnnnnnnnnnnnnnnnnnnnnnnnnnnnnnnnnnnnnnnnnnnnnnnnnnnnnnnnnnnnnnnnnnnnnnnnnnnnnnnnnnnnnnnnnnnnnnnnnnnnnnnnnnnnnnnnnnnnnnnnnnnnnnnnnnnnnnnnnnnnnnnnnnnnnnnnnnnnnnnnnnnnnnnnnnnnnnnnnnnnnnnnnnnnnnnnnnnnnnnnnnnnnnnnnnnnnnnnnnnnnnnnnnnnnnnnnnnnnnnnnnnnnnnnnnnnnnnnnnnnnnnnnnnnnnnnnnnnnnnnnnnnnnnnnnnnnnnnnnnnnnnnnnnnnnnnnnnnnnnnnnnnnnnnnnnnnnnnnnnnnnnnnnnnnnnnnnnnnnnnnnnnnnnnnnnnnnnnnnnnnnnnnnnnnnnnnnnnnnnnnnnnnnnnnnnnnnnnnnnnnnnnnnnnnnnnnnnnnnnnnnnnnnnnnnnnnnnnnnnnnnnnnnnnnnnnnnnnnnnnnnnnnnnnnnnnnnnnnnnnnnnnnnnnnnnnnnnnnnnnnnnnnnnnnnnnnnnnnnnnnnnnnnnnnnnnnnnnnnnnnnnnnnnnnnnnnnnnnnnnnnnnnnnnnnnnnnnnnnnnnnnnnnnnnnnnnnnnnnnnnnnnnnnnnnnnnnnnnnnnnnnnnnnnnnnnnnnnnnnnnnnnnnnnnnnnnnnnnnnnnnnnnnnnnnnnnnnnnnnnnnnnnnnnnnnnnnnnnnnnnnnnnnnnnnnnnnnnnnnnnnnnnnnnnnnnnnnnnnnnnnnnnnnnnnnnnnnnnnnnnnnnnnnnnnnnnnnnnnnnnnnnnnnnnnnnnnnnnnnnnnnnnnnnnnnnnnnnnnnnnnnnnnnnnnnnnnnnnnnnnnnnnnnnnnnnnnnnnnnnnnnnnnnnnnnnnnnnnnnnnnnnnnnnnnnnnnnnnnnnnnnnnnnnnnnnnnnnnnnnnnnnnnnnnnnnnnnnnnnnnnnnnnnnnnnnnnnnnnnnnnnnnnnnnnnnnnnnnnnnnnnnnnnnnnnnnnnnnnnnnnnnnnnnnnnnnnnnnnnnnnnnnnnnnnnnnnnnnnnnnnnnnnnnnnnnnnnnnnnnnnnnnnnnnnnnnnnnnnnnnnnnnnnnnnnnnnnnnnnnnnnnnnnnnnnnnnnnnnnnnnnnnnnnnnnnnnnnnnnnnnnnnnnnnnnnnnnnnnnnnnnnnnnnnnnnnnnnnnnnnnnnnnnnnnnnnnnnnnnnnnnnnnnnnnnnnnnnnnnnnnnnnnnnnnnnnnnnnnnnnnnnnnnnnnnnnnnnnnnnnnnnnnnnnnnnnnnnnnnnnnnnnnnnnnnnnnnnnnnnnnnnnnnnnnnnnnnnnnnnnnnnnnnnnnnnnnnnnnnnnnnnnnnnnnnnnnnnnnnnnnnnnnnnnnnnnnnnnnnnnnnnnnnnnnnnnnnnnnnnnnnnnnacagcacatcgccaatcggatgatgatagtaatctgccgcccagagcagtaatcgccagacagagtgagtaaataccggctcaacgtccagcacttcaactaccgctttcagctcgttaagcggcagctcactgacatcgctcactgacaccacaacaccgatacgctcctgttgtttgccaaacggcacgcgcacgcgactcccggctttaaccgtcatgccttctggcagcagatagtcaaaggtacgaggaagcggaacgggcaaggcaacgtgggcaacgggcatagcatcatcctgacttgaaattcggtgggttagtatacacattgccgtagaagagtgcggatcagtttgcatacgctggttaatttctgtatgatttcgcgccttcgtacgaaatgatcgtattgaagctatacttttaacatcgcgtggtgtctggcgttagggctggaagagcgacgcggccttaaaccgaggttttcccatgaaaaaagatattcacccgaaatacgaagaaattactgctagctgctcttgcggtaacgtaatgaaaatccgctccaccgttggtcatgacctgaacctcgacgtgtgcagcaagtgccacccgttcttcactggcaaacagcgtgatgttgctaccggtggccgtgttgaccgcttcaacaagcgtttcaacatcccgggcagcaaataagaccggatttccgaaaaaagcgccgcacggcgctttttttgtgcctgaattttggtcgtattaccaggaaaacagcggccattctttggcgaccgtggtgagttgtggcgcatcgaaaacggcttgtggcgagaccaccgtttcctcaagcggaatatttttcccgtaacgttctttgagtttcgcctgaaccagcgggttactaagatcgaactctttcaacttctgctgttcacctacgcgcatccccagcgcgttctgataaaccttccacaccacttccgaacagtactggcgatcgtcgctccacgagaagctgaaatcgtacggtttgccgagataacgttttgccgtttgcgccagtttttgctgttgttcggtattcagtccaccttcaacgcggcgaacaatgtatttgccatcttcaccgtgggcgatccactgcttgagcggggtgtattttaccgggccggccgcttcaaaaacgtagggctttttgttgcgtatcaccagcataccggtgtggctgtaatcggaatgggtcgccagttggatcgctttactttgcgatgagcgagagatctgaaagatgatgtcgccggtttgtggttgccaggcaaatgcaggcacagaaaccagcaggctgagaatcagtagcctgattttcatcgttaaacgtccatgtatgaaaaaagcggctggttaactccgcgccgctcttttccgctttagtattcccacgtctccgggttaatccccatctcacgcatgatctcttttgccgcctccggaatttcgtcgctgcgctctttacgcaggtcggcatcatccggcaaaggttgcccggtaaaggcatgcagaaacgcttcgcacagcagctcgctgttggtcgcgtgacgcaggttgttcacctgacgacgcgtgcgttcatcggtgaggatttttaacaccttaagaggaatggaaaccgtaatttttttgacttgttcactcttcttgccgtgctcagcgtatgggctgatatattcgccgctccattcagccatgagatacttaatcctcttcgtcaataaattgaggccagaccacacaattaatatgggtactgaccgtaaacccgcatagtttaccgtacaggcgttaccgtgacatcgtgtaatgcacctgtcggcgtgataatgcatataattttaacggctatttgagatttgctcaatctatacgcaaagaagtttagatgtccagatgtattgacgtccattaacacaatgtttactctggtgcctgacatttcaccgaccaagcccagggaacttcatcacatgacgcgtaaacaggccaccatcgcagtgcgtagcgggttaaatgacgacgaacagtatggttgcgttgtccctcccatccatctttccagtacctataactttaccggatttaatgaaccgcgcgcgcatgattactcgcggcgcggcaacccaacgcgcgatgtggttcagcgagcgctggcagaactggaaggcggtgctggtgcagtacttactaataccggcatgtccgcgattcacctggtaacgaccgtctttttgaaacctggcgatctgctggttgcgccgcacgactgctacggcggtagctatcgcctgttcgacagcctggcgaaacgcggttgctatcgcgtgttgtttgttgatcaaagcgatgaacaggcattacgggcagcgctggcagaaaaccccaaactggtactggtagaaagcccaagtaatccattgttacgcgtcgtggatattgcgaaaatctgccatctggcaagggaagtcggggcggtgagcgtggtggataacaccttcttaagcccggcattacaaaatccactggcattaggtgccgatctggtgttgcattcatgcacgaaatatctgaacggtcactctgacgtggtggcaggcgtagtgattgctaaagacccggacgttgtcactgaacttgcctggtgggcaaacaatattggcgtgacgggcggcgcgtttgacagctatctgctgctacgcgggttgcgaacgctggtgccgcgtatggagctggcgcagcgcaacgcgcaggcgattgtgaaatatctgcaaacccagccgttggtgaaaaaactgtatcacccgtcgctgccggaaaatcaggggcatgaaattgccgcgcgccagcaaaaaggctttggcgcaatgttgagttttgaactggatggcgatgagcagacgctgcgtcgtttcctgggcgggctgtcgttgtttacgctggcggaatcattagggggagtggaaagtttaatctctcacgccgcaaccatgacacatgcaggcatggcgccagaagcgcgtgctgccgccgggatctccgagacgctgctgcgtatctccaccggtattgaagatggcgaagatttaattgccgacctggaaaatggcttccgggctgcaaacaaggggtaaaaatgagtgtgattgcgcaggcaggggcgaaaggtcgtcaactgcataaatttggtggcagtagtctggctgatgtgaagtgttatttgcgtgtcgcgggcattatggcggagtactctcagcctgacgatatgatggtggtttccgccgccggtagcaccactaaccagttgattaactggttgaaactaagccagaccgatcgtctctctgcgcatcaggttcaacaaacattacgtcgttatcagtgcgatctgattagcggcctgctacccgccgaagaagccgataacctcattagcgcttttgtcagcgatcttgagcacctggctgcgttgctcgacagcggtattaacgatgcggtgtatgcggaagtggtgggccacggtgaagtgtggtcggcgcgcctgatgtctgcggtgcttaatcaacaagggctgccagcggcctggcttgatgcccgcgagtttttacgcgctgaacgcgctgcgcaaccgcaggttgatgaagggctttcgtacccgttgctgcaacagctactggtacaacatccgggcaaacgtctggtggtgaccgggtttatcagccgtaacaacgccggtgaaacggtgctgcttgggcgtaacggttccgactattccgcgacacaaatcggtgcgctggcgggtgtttctcgcgtaaccatttggagtgacgtcgccggggtatatagcgccgacccgcgtaaagtgaaagatgcctgcctgctgccgttgctgcgtctggatgaagccagcgaactggcgcgtctggcggctcccgttcttcatgcccgtactttacagcccgtttctggcagcgaaatcgacctgcaactgcgctgtagctacacgccggatcaaggttccacgcgcattgaacgcgtgctggcctccggtactggtgcgcgtattgtcaccagccatgatgatgtctgcttgattgagtttcaggtgcccgccagccaggatttcaaactggcgcataaagagatcgaccagatcctgaaacgtgctcaggtgcgcccactggcggttggcgtgcataacgatcgccagttgctgcaattttgctacacctcagaagtggccgacagtgcgctgaaaatcctcgacgaagcgggattacctggcgaactgcgcctgcgtcaggggctggcgctggtggcgatggttggggcgggcgtcacccgtaacccgctgcattgccaccgcttctggcagcaactgaaaggccagccggtcgagtttacctggcagtctgatgatggcatcagcctggtggcagtactgcgcaccggcccgaccgaaagcctgattcaggggctgcatcagtccgtcttccgcgcggaaaaacgcatcggcctggtattgttcggtaagggcaatatcggttcccgctggctggaactgttcgcccgtgagcagagtacgctttcggcacgtaccggctttgaatttgtgctggcaggcgtggtggacagccgccgtagcctgttgagctatgacgggctggacgccagccgcgcgctagccttcttcaacgatgaagcggtcgagcaggatgaagagtcgctgttcctgtggatgcgcgcccatccgtatgatgatttagtggtgctggacgttaccgccagccagcagctcgctgaccagtatcttgatttcgccagccacggtttccacgtcatcagtgccaacaaactggcaggagcgagcgacagcaataaatatcgccagatccacgacgccttcgaaaaaaccgggcgtcactggctgtacaacgctaccgtcggcgcaggtttgccgatcaaccacaccgtgcgcgatctgatcgacagcggcgatactattttgtcgatcagcgggatcttctccggcacgctctcctggctgttcctgcaattcgacggtagcgtgccgtttaccgaactggtggatcaggcgtggcagcagggcttaaccgagcctgacccgcgtgatgacctttccggcaaagacgtgatgcgcaagctggtgattctggcgcgtgaagcgggttacaacattgaaccggaccaggtacgtgttgaatcactggtacctgcccattgcgaaggcggcagcatcgaccatttctttgaaaatggcgatgaacttaacgagcagatggtgcaacgactggaagcggcccgcgaaatggggctggtgctgcgctacgtggcgcgtttcgatgccaacggcaaagcgcgtgtgggcgtggaagcggtgcgtgaagaccatccgctggcatcactactgccatgcgataacgtctttgccatcgaaagccgctggtatcgcgacaacccgctggtgatccgcgggccaggtgcagggcgcgacgtcaccgccggggcgattcagtcggatattaaccgactggcgcagttgttgtagtgattattgaacaaaagctggcagttgccagcttttgttgtcacccctaaacctcttcctggggaagtggtgattgattgtcattttgcctttggtcagtgcccccggtaataagggggcttttgtgttgagcgatgaagtaacagagtgaatggtgaagttattaatgacaattacaaaatgacattaagtaacaatatctaaaatgtcacctaatttaaaattgataaccaatagtagtataggttccccatcctgtattttttaattcaaatggaccatctccgaagttaaccttctctcccgcattccattgtccaccgttgtgaaaataacgtagtgtaaatgcaaatttccagtgttcatatagaagggaaaggatatggcttgaagcaatagcattactggttcgtttattattgtgtgacttgtccgcaagatcggagccaaaatcaaagttagtaaaactattgtataccaatcgtcctccgaataaatttgtaagagggatgctatattttattttgaatcgatatccgtcccattcattttcattagcggcaccatagttttgccactgatacttggcgtatatattggcagaaagcttaattggtagacccgtgtcgatatctgtaccaagccccatataccatgtactttgccgggatgactggttgtcacccatatcatagacatagttgtttgcaatgaaccattctttaaatgggccgaacgcaagatttaatccggtcaatttgtcaatggaaaaccgaggttctatttccgtaaatagtggtgagccctcatcccagatcccaacatcatagtgactgccgacgccaaagaatttcggtagatcaacataaccataaaaatcaaaccagtcttttcttcctgctacagtatattcagggtagaggtcgttagtcagtcttgggccaaagcgagagtctgtgcgaccaatgacattcaagctttgatgtaaccagctttcatcaattttaatttcctgagcgtttccaatgcaaggtattaatagaatggataaagctatccagtgcttttttatatacataaatatatctcttatatattgttgatttagagagaaataatgtcatccagtgaatgaatggtattataagtttttgttatttgcttacttctacccgcatttcatttacctgtgcaggagtaatcttgtggcctttcttaaaataatcgattacgacattggacatgttatttccggcgcggacctggacatttttcccttctttgaatgccagaaaaccatcgcccccaagtgcaaggaaagtcgtagtcgcaacatggtaaatattcgtatcaacgatctcttcaccattaattttaaaagatacaatgcgctgacctactggtttctgcagggtatagcgcatttctgcgccttttgacatttgcaggatgccattggtaagcgatgccccgtgttccagtaggttacgcagatccttaccgctgagatccatttcagtaagttcattcttgaaggggaatgtactggtaatgtcaccaaaggtaatcgtgcctgcatttatatcagcacgtaaactgccggagtttatcaacgcaatttgtgcagtcggtgcagcgacaagcattgcatcggtaaacaggttgccaagttgcgatgactcaccgtaggcacgagttaatgcaatcgatgattcaccgactggttggcgtacaagatccgccagttttttattccagccattgataactttttgtgtggttggatcaggtatccattcatcggcataaaccgttttcagctcaaagctcttcactttatgagtacgagctgtagggttgacatcaaggattaatttaccaatatcgataccgccactgtcagtcgaaaggattaaggtgttgccgactttgattggttctggcgttccgacgtgggcatgcccggtaatcagaatatccaatcctttcaccttgcttgcggtttgaatatctttatccagcgcacgtctaacatctgtattgccaatgctggactgacgcgccggtacgccttcatgaaccagcgccacggtgaggtcaaccttatcacgtaactcatcgatataatgctgcaaatacttcacttcatcacgtgcttcaatcccctgattcttgagggtcgcggaagatttatcaaatcggttattattgtcattatcgagtccctggagagagagctccgagaccgtgtcattaaatgcaaatacgccgtgtagcccaacaataccaatcttgatgccatctttttccaggatggtgtagggcttgttccagaagggtttctcactctctttatgataaacattgcctaataaaacagggaaattcgctttgcttaattgtcggagggcattatcccagccatggtcaaactcatgattaccgattgatactgcgtcaaaaggcatggtattcataatatcaattattgcttcgccctttgtcaggctactgatatatggcccggtgaaatagtctccagcatcaaaataaaaggtggctttatttttggctttctcttgttttactaacgtggatatattggcaaagccaccaatgtcgcgttttccgtctgcgacatacggtactttataggaatccacatgagcgtgaagatcattggtataaataatcgtgacatcctgcgccataactgaggtcgaaaaaatagtcagcaatgttgcggcaaataaagtacgctgcgctgttttcattcgcattccttgttaaataaattgactgataaatgagattttatttggcgacgtccatgactcgtttagttaagtctggggtgacaggtttatgatttttgaaataatcgatgatagattccgccgaggttgttcccggtatcgtcttcacattttttccattcaaaaatgcttcaaaaccgtcaccaccactggcacaaaaggagtgcgtggcaatacgatatgtttgattatcttccacgggtttgccgttaatggtgaaagagattaaccgttggttgagtggttttttgctgtcatagacaaccgcaacacttttagaaacttgtaacacaccgttagttagattggttgcatgcgtcatcaatgatttgagatcgcggcccgtcaaatccatctcgatgaggtcattattaaaggggaatgtgctaataacatctcccagtgtgatatcgcctttaggaaaatcagctcgcatcccaccgctattttgaaatccggcaacggcatcaggtgttttttccatcattgcatcaagaataaggttgccggtagaagaggaactaccatactcacgtgttaaaactacgggagaatggccgacaacttcctttgttattttgttaagctttgcactccatttatcaatagtattttgaacgatggtgtcaggtttaaattgatctgcaaagatggtgattaactcaccattataactatcaattttcttcgttttcggattgtaatcaagcacaagttttccgatgttggtgccgtatgcatcggtagatacaattaatgtgttattaacttttattggttgcggtgttccgacatgtgcgtgaccggtaattaagacatcaacaccattcacttttttagctgtctcaatatctgcctgtagtagccgctccacatctttactaccaaagcttgattgacgcgccgggacaccttcgtgaattagcaaaacggtaatgtcgactttaccttttaattctgcaagtgctttatttaaatatttaatttcgtctctggcttctacgccttcacgtgcttttgccgcgactgtatcatagaaagcgaatgcgccatgcaatccaatcacaccaatctttaaaccatctttttcgataatggtccacggatgatcccaaactggtttattcgtatcggtgtagtagatatttcccagcagaatggggaattttgcttttgataactgagacaccatattgggcacaccgtgatcgaactcgtgattaccaacagacaccgcatcaaagggcatagtgttcatgatatcaataatagcttcacctttggtcagggtgctgatatacggcccggtaaaatagtcgcctgcatcaaagaaaaacacatctttgctttttttcttcgcttcattaacgatgcctgcaatattagccataccacctataagtctgttcttatcaacagcgatgatttttgccggattgacatgtgcgtgaatgtcattcgtataataaatagtaacgtcctgagctagaacactgtgagaaaatatcacgccgaatatgactgataatgttgtaaatacagttttcatcatccctcctggatagggtgtgttacatttgttgaattatttaaataaaaggcacatcgtgtcttattttatgtaagcatagttcagaaaagtattgtgtgatcttagtaacaaataatgttattaattaaacattgaccatgattatatttcacggtcatacatttatatatttaattaaatgaaaggtagtgatctctcttaatttatggtcgtttgtcgagtgtattgactaacaagatggagtgagcgattcattgtattttaacgccagtgaggtcagcatttgcgttacgcgacctgcggataataacgcgctttgggtaaagtcgtgttggtctgtcagccatgtgataaaacaacgactggttgccagagaaacatttgcgcccctttctaagctggctcccgtgagtaggcagaccatcttgcaattattcccctgctcccagcgctgccactgattttgccaccaaccatggtatgtcgttcccttaaaatgccagggcgtatcagcgttactgtcactgatttcttcttctacgaaccaaagttcaccttgttgttggcggaactgatctgcccaggctgtaataattgcgcctcttagaaaacattcgtgtgaaataatatgcgttttgacatctggatagcggattttcagtattctgaaatgcccgtgtgccgtgataaccgggcgtagtatggctcccttaccgttgcgcttgagtacagcactgccatactgaatttcatcgaactggctccggcgcaagaattgcgcttcacgcatatctaccttctgcacgatatcgcgatggtgcatagttggttctgtgttgcccttgtaactgtaccgcagactgtctcctgtctgatgttgcgtataattcgtggagagatgaagaatgttgccacgagtggcgtcaagactgactaaaacatacagtttttgtactgcgctggccccttgaaagggtatgaacagttgaacggtttcaatggcctggggatgcgtaatttctttctgatattttttaggcgtccagacttttttgcagttacggcattgaatgcgttgcgaaccctgtggattgtgaccataacaaatcatgtctgtgccataacataccgggcagaaatggcctttctcaattgcataagtagacaagtgaactgacaaccagtcacgaaattgttgctcgtcaaacaacggcgggtaactgccacatgcccgacagtgcagtgccggataacccagtttatagtctggccaactgtaatcttccgatgaggccaatcccaaatttcggcaaccgaacgttttacaggcattaatcgtaaacagagtcgacatatatcaccaacgatttcacaaggtcgttgattttgtccggcaactatcccctgcggatgtgattactctcacataaataagtctttcagaacgtaatgtagcaatcctttatctcactgaaagggattgtttatgaaaattaaaatacttgctgcgggtatcgcattaacactgccgttctgggcttgcgctaaagatgtcactatcatttataccaacgacctccatgcgcatgtagaaccttataaagtgccgtggatcgctgacggtaaacgggatattggcggctgggcaaatatcactacgctggttaagcaagaaaaagcaaaaaataaagcgacatggttttttgatgcgggcgactattttaccgggccatatatcagcagcctgaccaaaggtaaggctattatcgatattatgaatactatgccgtttgatgccgtcacaataggcaaccatgaatttgaccacggctgggacaacacattattacagttgagccaggcaaaattccctattgtgcagggcaatattttttatcagaacagcagtaaatcattctgggataagccatataccatcatcgaaaaagacggtgtgaaaataggcgttataggtttgcacggagtatttgcctttaatgatacggtatctgctgccacgcgcgtgggtattgaagcgcgcgatgaaattaaatggctacaacgttatatcgatgaactcaaaggcaaggttgatttgaccgtcgccctgatccacgaaggtgttccagcccgccagtccagtatgggaggcacagatgtgcgtcgcgcgttggataaagatattcagacggcaagtcaggtgaaagggctggatattttgatcaccggacatgcacatgtgggtacgccggaaccgattaaagtcggcaatacgctcatcctctccactgacagcggcgggattgatgtgggcaaactggttctcgactacaaagagaagccgcataattttacggtgaaaaacttcgagcttaaaaccatttacgctgacgagtggaagcccgatcagcaaacgaaacaggtgatcgacggctggaataaaaagcttgatgaagtggtgcaacaaacggtggcgcaatcgccggttgaattaaaacgtgcctatggtgaatcggcttccctcgggaacctggcggctgacgctttactggcagcagcgggtaaaaatacccaactggcgttaacaaactctggtggtatccgcaatgagatccccgcaggggcgattacgatgggcggcgtcatcagtacgttcccgttccccaacgaactggtgacgatggaactcacgggtaaacaattacgcagtctgatggaacacggcgcaagtttaagcaatggcgttttacaggtatcgaaaggcctggaaatgaagtacgacagcagcaagccggttggtcagcgggtaatcacactgactctgaatggcaaacccattgaagatgcgacggtttatcacattgctactcagagtttccttgctgatggtggagatggttttaccgcctttaccgaagggaaagcgcgtaacataacgggcggttattacgtttatcacgcggtggttgattacttcaaagcgggcaacaccattacggatgaacagctcaacggtatgcgcgtgaaggatatcaaataaaagtgcgcactgaattgactcaactgtttgttacccgttgattgcgcagatcctgtattcggcctacgcgagggcgcaggccaaatcagatgccttaacatcaccatccggtggcaggacgttgtttttcgaattagcccaggtgtcgctgtgttgtcagaatatgagtcaaaacgtgcgaggtggattgcgctatagagaaatcttttatcgcctctaattaagatgagtttttttcatcttccctgatttttcctcaccatcattggttatttttcggttgacgcccttcggcttttccttcatctttacatctggacgtctaaacggatagatgtgcacaacacaacatataacgataagcgattgatgaggtaaggtatgagcttttttcacgccagccagcgggatgccctgaatcagagtctggcagaagtccaggggcagattaacgtttcgttcgaatttttcccgccgcgtaccagtgaaatggagcagaccctgtggaactccatcgatcgccttagcagcctgaaaccgaagtttgtatcggtgacctatggcgcaaactccggcgagcgcgaccgtacgcacagcattattaaaggcattaaagatcgcaccggcctggaagcggcaccgcatcttacctgcattgatgcgacgcctgccgagctgcggatcattgcacgcgactactggaataacggtattcgccatatcgtggcgctgcgtggcgacctgccgccgggaagtggtaagccagaaatgtatgcttctgacctggtgacgctgttaaaagaagtggcagatttcgatatctccgtggcggcgtatccggaagtacatccagaagcgaaaagtgcccaggccgatttactcaacctgagacgaaaagtggatgccggagccaaccgcgccattactcagttcttcttcgatgtcgaaagctacctgcgttttcgcgatcgctgcgtctcggcaggcattgatgtggaaatcattccgggaattttgccggtttcgaactttaaacaggcgaagaaatttgccgacatgaccaacgtgcgtattccggcgtggatggcacaaatgttcgacggcctggatgacgatgctgaaacccgcaagctggtgggcgcgaatattgccatggatatggtgaagattttaagccgtgaaggagtgaaagatttccacttctatacgcttaaccgcgctgaaatgagttacgcgatttgccatacactgggagttcgacctggtttataaatagtgtgccttttgtgaaaatcacacagtgttcacaaattttaaacagagcacaaaatgctgcctcgaaatgagggcgggaaaataaggttatcagccttgttttcgccttcattacttgaagggtaccaggctaaaaccttttcttataaagcattctgccgaaatcagacatactcataaaggcttaattacgatcaatttgatctacatctctttaaccaacaatatgtaagatctcaactatcgcatccgtggattaattcaattataacttctctctaacgctgtgtatcgtaacggtaacactgtagaggggagcacattgatgagcacgtcagacgatatccataacacgacagccaccggcaaatgcccgttccatcagggcggtcacgaccagagcgcaggtgggggcacaaccacgcgcgactggtggccaaatcaactccgtgttgacctgttaaaccaacattctaatcgttctaacccgctgggtgaggactttgactaccgcaaagaattcagcaaattagattactacggcctgaaaaaagatctgaaagccctgctgacagaatctcaaccgtggtggccagccgactggggcagctacgccggtctgtttattcgtatggcctggcacggcgcgggtacttaccgttcaatcgacggtcgcggcggcgcgggtcgtggtcagcaacgttttgcaccgctgaactcctggccggataacgtaagcctcgataaagcgcgtcgcctgttgtggccaatcaaacagaaatatggtcagaaaatctcctgggccgacctgtttatcctcgcgggtaacgtggcgctggaaaactccggcttccgtaccttcggttttggtgccggtcgtgaagacgtctgggaaccggatctggatgttaactggggtgatgaaaaagcctggctgactcaccgtcatccggaagcgctggcgaaagcaccgctgggtgcaaccgagatgggcctgatttacgttaacccggaaggcccggatcacagcggcgaaccactttcggcagcagcagctatccgcgcgaccttcggcaacatgggcatgaatgacgaagaaaccgtggcgctgattgcgggtggtcatacgctgggtaaaacccacggtgccggtccgacatcaaacgtaggtcctgatccagaagcagcaccgattgaagaacaaggtttaggctgggcgagcacttacggcagcggcgttggcgcagatgccattacctctggtctggaagtggtctggacccagacgccgacccagtggagcaactatttcttcgagaacttgttcaagtatgagtgggtacagacccgcagcccggctggcgcaatccagtttgaagcggtagacgcaccggaaattatcccggatccgtttgatccgtcgaagaaacgtaaaccgacgatgctggtgaccgacctgacgctgcgttttgatcctgagttcgagaagatctctcgtcgtttcctcaacgatccgcaggcgttcaacgaagcctttgctcgtgcctggttcaaactgacgcacagggatatggggccgaaatctcgttacatcgggccggaagtaccgaaagaagatctgatctggcaagatccgctgccgcagccgatctacaacccgaccgagcaggacattatcgatctgaaattcgcgattgcggattctggtctgtctgttagtgagctggtatcggtggcctgggcgtctgcttctaccttccgtggtggcgacaaacgtggtggtgccaacggtgcgcgtctggcattaatgccgcagcgtgactgggatgtgaacgccgcagccgttcgtgctctgccagttctggagaaaattcagaaagagtctggcaaagcttcgctggcggatatcatcgtgctggcaggtgtggttggcgttgagaaagccgcaagcgccgcaggtttgagcattcatgtaccgtttgcgccgggccgcgttgatgcgcgtcaggatcagactgacattgagatgttcgaactgctggagccaattgctgacggtttccgtaactatcgcgctcgtctggacgtttccaccaccgagtcactgttgattgataaagcacagcaactgacgctgaccgcgccggaaatgactgcgctggtgggcgggatgcgcgtactgggtgccaacttcgatggcagcaaaaacggcgtcttcactgaccgcgttggcgtattgagcaatgacttcttcgtgaacttgctggatatgcgttacgagtggaaagcgaccgacgaatcgaaagaactgttcgaaggccgtgaccgcgaaactggcgaagtgaaatacacagccagccgtgcggatctggtctttggttctaactctgtcctgcgtgcggtggcggaagtctacgccagcagcgatgcccacgagaagtttgttaaagacttcgtggcagcgtgggtgaaagtgatgaacctcgaccgtttcgacctgctgtaatctgaccttcttcagcgactgcctttcatgcagtcgctgaagtttctttaccggcgtatagtgtccacaggaaaactacacactggatctctcatgtctgccgcaggaaagagcaacccactggcaatcagtggcctggttgtgctcacacttatctggagttatagctggattttcatgaagcaagtcaccagctacatcggtgccttcgacttcaccgccttacgctgcattttcggcgctctcgttttattcatcgtccttttattacgtggtcgcggaatgcgcccgacgccgtttaaatacaccttagccattgccctgttacaaacctgcgggatggttggcctggcacagtgggcgctggtcagcggcggagcggggaaggtggcaatcctgagctataccatgccgttctgggtggtaattttcgccgcgttgtttctcggtgaacgcctgcgacgtgggcaatatttcgcgatactgattgccgctttcggcttatttttggtgttgcagccgtggcaactcgatttctcttcgatgaaaagtgccatgctggcaatcctctccggtgtgagttggggggcgagcgcgattgttgctaaacgtctgtatgcccgccatccgcgcgtggatttattgtcgctaacatcctggcagatgctgtatgcggcgctggtgatgagcgtggtcgctttactggtgccgcaacgtgaaattgactggcaacccaccgtgttctgggcgctggcctacagtgcgattctggcgacagcgctggcgtggagcttatggttgtttgtattgaaaaacttgcctgccagtattgccagcttaagcacactggccgttcccgtttgcggcgtactcttttcctggtggctgctcggtgagaatccgggggcagttgaaggtagcggtattgtgctgattgtgctggcactggcgctggtgagccgtaagaaaaaagaagccgtcagtgtaaaaaggatctgaattttttcttcatgtggggagatctcttatttagcaaaataccgatagtgccccaccatccgccagctaaacagtacatcttcttcctgcgcgcctgcgccaatgttatgtatcaccagcggcgtaccgtcgcgggcgaagccatctgacaccaccccaatatgtgccagcccgttatctaatcgccaggagacaatatcgcccgcttgatagtcactggggttcttgctggtggggcgtgttttatcgtggcgggtaaaccaggtttccagattaggcacccgacggtgatcgatgttgctgtccgggcgctttaactgccatttttgcgggtacgcagcaaaattcttcgccatatcttcgtgcaccagtttctgcaaatcgaccttctggctgcgcaatgcacggatcaccacatcggaacatacgccgcgttcttgcgggacatcaccgccaggataggtaagctgcacatacgccggatcgtaaaatagcgtgctgccgatttgcagtctggcgccgtctgcgatggcaagattggtgttagcctggatttgtaccacggttggtggaacggcgggatattttaaggagtaactggtaaataacgtcagaagactgaataacgccagtgaagctttcatctgtttcgtccgtgaaaataagagtcacagattcgaccttccgggctaacgattgttctgtggagaaaatgtccagaagcggataaaaaaacacccgaacaaggtggaagtttcagattactggcacagcgtgccggatgcggcgtgaacgccttatccggcctacaaaagtacgtaaatttactatattgcagagattgcgtaggcctgataagcgtagcgcatcaggcaattttgcgttcaaactcccggacaagccgggagtttggagtaggttattcccactcttgcaggaaacgctgaccatactggtcggctaccagcagtgcggcgtaaacctgatctggcgtcgcgccgccaggcatgttgtggatggtttcaccttctgcacatgccgcttctgccacaattcgcattttcgccgggacatcttctttaatatccagttgagcgagagttattggcaaacctaccgcatggctaagcgcagctacggtttcgatttcctccaccggcgcgttttccagaaccagctgcgtcagcgtaccgaatgccactttttcaccatgataatagtgatgcgcgtccgggatagcggtcaggccgttatgtaccgcgtgtgccgccgccagcccgccgctttcaaaaccaacgccactcaaataggtgttcgcttcaatcacgcgctccagcgctggagtcactacatgctgttcggcggcaagcatcgctttttcgccttcttccagcagggtgttgtagcacagttcagccagtgccagcgctgcctgagtgcacttgccacccgccatggtggtcgcgccgctacgggaacaggcacgcgcttcaaaccaggttgccagcgcatcgccgatacccgccgctaacagacgtgcaggtgcaccagcgacgattttggtgtcgacaatgaccatattcgggttatttggcaacagcagatagcggtcaaactcaccctcatcggtgtagataacagacaatgcgctgcacggtgcgtcggtagaagcgatagtcggtgcgatcgctaccggaacacccatgaaatgtgccagtgctttggcagtatcgagggtttttccgccaccgataccgagaattgcgccacactgcgcagtctccgcgatgccacgcagacggtcgatctcattttgcgaacattcaccgccaaacggcgcaatttctactaccagtccagcatctttaaagcttttctcgacagtggattgagcaaaacctaaaacaaatttgtcacccaccactaaccagcgttccgccagtggcttcaggtactcgcccagacgattaattacatctgcgccctggatgtatttacctggtgattgaataatgcggtccataattactcctttagagatgagtagtgccaaatgcggcattccagtcgtgctcgaacttctctatagctgactctaccgcaggggtgttaagcatttgttgcgctacatctaagggcagtgtgatggattcacatccagccagcaaacaatccagcgcctgacgtggtgttttaaagctggcagccagcaccatgctttctggcgcatgcatttccagtaacgcttgcaactcctgtacagtacgaatgccgtcaccgccctgggcatctacgcggttaacgtatggagcaacgtatttggctccagccagcgccgccagtaatccttgcgcggcgctgtacactgcggttcccagcgtagtaatgccttctttcttcagcattttaattgctgccagaccttcagaggttaccggaattttcaccacaatgcccggaatagcgtcgcgcaggtgtttcgcttctttcaccataccctgcgcgtcgcggctcatggtctgagcaaacagaatgccctcatcaccaatcgctttttgcaggcgcggcagcacttcccagatggactccttgctggcagcgataatgctcgggttagttgtcaccccggcaatcgggaatatgcgtgccagacgttcgacttctgcgacgttagcggtgtccagatacagttccatgatgtttccttttacagttccagttcatgttgcagcaggctggcgatagcgtcggcagaggcggcgttaaccagcgcattacggaattcttcgtgcatgatgcgacgagcgaggcgcgagaaaatgcgcatatgttgatcgcccgcggcgtgtttgttcagggttaacataatgatgaattgcgcttcatcatcgccccagcgcattggcgcttgcagacgcgctacgctgatggtggattgctcaatgtgttccgatttactgtggggaatggcgaaactaaagcccagtccggtagagaaaacggcctcgcgcgcccacaagtcggcttccagtttacgcggatagcggcagcggcccgccagcagcaggttatcggtcatgcctttgagcacttcttctttgctgcgccagtcgctttccagtgtgatgcactcggcggtgaccagcggtgcgtcctgttgggtcatgcggaattgcgccagcaggtgttccacttccagcgaagtacggcaggccattgcttggttgagcaactggcggcactcacggctatcaagttgcgccatccgcgctttcgccgccggaattgatggtgcgctcatgctgagttcatccagccctaaaccgaccagcaacggcagcacggaacctttcgctcccagttcaccgcacagaccaatccatttgccctggcgatgcaccgcctgcacggcgtaatcgagcgcccgcaagaaggccggattcaggctgttgtagtgacgagtcaccttagcgttatcgcgatccactgccagtagatattgcgtcaggtcattactgccgatactgaagaaatcaatctcttcgcagcattgatcgatgatgaacatcaccgacggcacttccagcatgatgccgagctggatcttctcatcaaacggaatgtgttcgttacgcagttgctgtttggcttccgccagtttttctttcacccataagatctcttccattgaggagatcatcgggatcatgattttcaggctgccgtgagcagaggcgcgcaggatcgaccgtagttgtgtggtaaacaacgacgcgtattcttcataaatacgcaccgcgcgataaccgaggaacgggttagcttctgccggaatgttcagataatcaacgggtttatcaccgccaatgtccatagtgcgcacaataatgctgcgtccgttggcagactccagcgcctgacaaaaaatgttgtacagctcgctttcacccggtgcactggtgcgatccatatagagcatttcagtgcggaacaaaccaacgccttccgcaccattgccgaatgcggcctgcgcttccacggagtgagcgatgttagcggcaatttcaatgcggataccgtctgcggtacgcgcttgctgggtcagccagacacgctgttgctcacgcagagcgtcctgtacgcgggcttcttgctgataataacgggccacggattcccctggctcaaccacaatcgcccctgcgttgccgtcgatataaatcgtctgatgctgccacggagtaagggcagcaatatccacacctaccagcgtcggaatgttgaacgaacgggcaaggatcaccgtatgtgatgtggtgccgccacttttcagtaatagacctttgaggtgatttttatccagttcgaggaactggctgggggtcagttcatcagccatacaaatggcgggctgcgtcagtttgcccggtgccgggaagcgttgctcaccgtagatttgctggagtaactggaagcagacgtcgcgtacgtccagggcacgttcttgcaggtagctgctgctggaacgggcgaactcttcgcaaaagtgattcgcactggcaacaatcgcttcggcgcagcttaatccggcgctgacacctgccagtaaatgttcgcgcagggaagtatcgccagccagggatcggtgcgcttccagaatcgcgctggtagcaccgtcgctatccagcagacgaaactctatgtttttcagtaccagcgtcagaccgttttccagtgcggattgttcggcgtcaacgcctttggctgcgggaagattacccagcgcattgagatctaaagaagagatcggcgtcagaatgccgcctgcgctaccactgcacacggtgcgagcacggataatttgcggattcagattggtcagtgaaaccggcagtggttccagttcgtcagattttacttccgccagcggtgcgtcgcagtgggggaattcatcgcgcagccattggcttaaacgctggtacgcttcctgttcgtcggccccggaaatcagtaactggcagttatcgcccaccagcgtatcggtgccaatcagcgcaagggcgcttttggcgttgcccttgcggtcagtgcgcaggttatgccactcaatttgtgatgaaaaagtattacacagcgtttcaacgtggcttgccggacgcgcatgcacgccgttaggtagctcacaaataaattccacaatcagggccattgcctttctcccggtacggttttctgtttacaggataagagcgcacggcaacggcctgccatgtgacaaatctgccaaaagctggacaaatgtaatgtaaccgtcaatttgcgacgcgtctcacaagacgccgttttgcggcgtacttccggattatcgcaagttatgaggcggatcgcatttttgtactgatattacaaaagtccagtaaatggcctttttatccactgtttgctccgcctgcgattgcctattgtttcttccatcaaaaatatggacatgggctttcgcaagcccgggagcagcttatgaatgagttggtgcagatcctgaaaaatacccgtcagcatttaatgacgggcgtttcacacatgattcccttcgtggtatcgggcggtattttgctggcggtttccgtcatgttgtatggcaaaggcgcagtgccggatgccgtagccgatccgaatctgaaaaaactgtttgatatcggcgttgcaggtttgacgctgatggtgcctttcctcgccgcttacatcggttattccattgcagaacgttctgcgctggctccatgcgctatcggtgcctgggttggtaacagctttggcgcgggcttctttggtgcgctgatcgccgggattatcggcggcatcgtggtgcattacctgaagaaaattccggtgcataaagttctgcgctcggtgatgccaatcttcatcattccaatcgtcggcacactgattaccgctggcgtcatgatgtgggggctgggcgagccggtgggggcgttgaccaacagcctgacccagtggcttcaggggatgcagcagggcagcattgttatgctggcggtgatcatgggtctgatgctggcgttcgatatgggcggcccggttaacaaagtggcctatgccttcatgctgatttgcgttgctcagggtgtttataccgtggtggctattgccgctgttgggatttgtgttccaccgctggggatggggctggcgacgctgattggtcgtaaaaatttctccgcagaagagcgcgaaaccggcaaggcggcactggtgatgggctgtgttggcgttactgaaggggcgattcctttcgccgctgccgatccgctgcgtgtcattccttccatcatggtcggttcagtttgtggtgcggtaactgcggcgctggtcggtgcgcagtgctatgcaggctggggtggtctgattgtgctgccggtggttgaaggtaagttgggttacatcgcggcagtggctgtcggggcggttgtgacggcagtctgcgtgaacgtgctgaaaagtctggcgcgtaaaaatgggtcttcaactgaagagaaggaagacgacctggatctggattttgaaattaattaattgaggaacgagccatgacgaaaattatcgcagtaaccgcatgtccttcaggtgttgcccatacttatatggcggcagaggcgctggaaagcgccgcgaaagcgaaaggctgggaagtgaaagtagaaacccaggggtcgattggtctggaaaatgaactgactgcggaagacgtggcaagcgccgatatggtgattttgaccaaagatatcggcatcaaatttgaagagcgttttgctggcaagactatcgtgcgtgtcaacatcagcgacgcggtaaaacgtgctgacgccattatgagcaaaattgaagctcacctggcgcaaaccgcttaagttcttatcccgcccgcaagggcgggttcgctttcccacaggagttcctcatgacgaatcgtatctctcgcctcaaaactgcactgtttgccaatacccgtgaaatctcgctggagcgggcgttgctttataccgccagccatcggcaaaccgaaggggagccggtgataatgcgtcgggcgaaagcaacagcgtatatccttgaacacgttgaaatttcgattcgtgatgaagaactgattgccggtaaccgcaccgtaaaaccacgcgccgggattatgtcgccggaaatggacccttactggctgctgaaagagctggatcaattcccgacgcgtccgcaggaccgctttgctatcagcgaagaagataaacgtatctaccgcgaagagttgttcccgtactgggaaaaacgttcgatgaaagatttcatcaacgggcagatgacggatgaagtaaaagccgcgaccagcacgcagattttcagcatcaaccagacggataaaggccaggggcacattattattgattacccgcgcctgctgaatcacgggctgggggagctggtggcacagatgcagcaacattgtcagcaacagccggagaatcacttttatcaggcagcgctgttactgctggaagcctcgcagaaacatattttgcgttacgccgaactggcggaaacgatggcggcaagctgcactgatggcccgcgtcgcgaagaactgctgaccattgcggagatctcccgccataacgccgaacataagccgcagacgttctggcaggcgtgccagttattctggtacatgaacatcattctgcaatacgaatccaacgccagttcgctatcgttggggcgcttcgaccagtatatgttgccgttctatcaggcatcattaacccagggcgaagatccggcattcctgaaagaactgctcgaatctttatgggtgaaatgcaacgacatcgtgctgttgcgctccaccagtagcgcgcgttatttcgcaggtttccctaccggctataccgcactgctcggcgggttaaccgagaacggacgtagcgcggtgaacgtgctttcgttcctttgccttgacgcttatcaaagcgtgcaattaccgcaaccgaacctcggcgtgcgcactaacgccttgatcgacacgccgttcctgatgaaaaccgcagaaaccattcgcctcggcaccggtattccgcaaatctttaacgatgaagtggtggtgccagcgttcctcaaccgtggcgtttcgctggaagatgcgcgcgactattccgtagtgggctgtgtggaattatctattcccggcagaacctacggcttgcatgacatcgcgatgtttaacctgctgaaagtgatggaaatctgcctgcatgaaaatgaaggcaatgctgcgctgacttatgaaggtttactggagcagatccgcgccaagatcagccactacatcaccctgatggttgagggcagcaatatttgcgatatcggtcaccgtgactgggcacctgtaccgctactctcgtcttttatcagcgattgtctggaaaaaggtcgcgatattaccgatggcggcgcgcgttataacttctccggcgtacaggggatcggtatcgccaacctgagcgattctctccatgcgttgaaagggatgatttttgatcaacagcgtttaagttttgacgaattgctgtcggtattaaaagccaacttcgccacgccagaaggcgaaaaagtccgcgctcgcttaattaaccgcttcgagaaatacggtaacgatatcgacgaggtggataacatcagcgccgaactgttacgccactactgcaaagaagtggaaaaataccagaacccgcgcggcggctacttcacgccgggatcgtataccgtttctgcccacgtcccgttgggatcggtggttggcgcgacgccagacggtcgttttgccggagaacagctggcagacggcggcttgtcacccatgctgggccaggacgcacaagggccaacagcggtactgaagtcagtcagtaagctcgataatacgctgctgtctaacggtacgttgctgaacgtgaaattcactccggcgaccctggaaggtgaagcgggattacgcaaactggccgacttcttacgggcgtttacccagcttaagttgcagcatattcagtttaacgtggtgaacgccgacacgttacgggaagcgcaacagcgcccacaagattatgccgggctggtggtgcgcgttgccggatacagcgccttctttgtcgaactgtcgaaggagatccaggatgacatcatccgccggacagcgcatcagctgtaacgttgtggaaacgcgccgcaatgatgtggcgcgcattttcaacattcagcgttattcactgaatgacggcgagggcattcgtacggtggtcttttttaaaggctgtccgcatctttgcccatggtgtgctaatccggagtcgatctccggcaaaatccagacggtgcgcagagaggcgaaatgtctgcactgcgcgaaatgtttgcgtgatgcggatgaatgcccctccggggcatttgaacggattggtcgcgatatcagccttgacgctctggaacgggaagtgatgaaagatgacattttctttcgcacgtccggcggtggcgtcacgctttctggcggcgaagtgttaatgcaggcggagtttgcgacccgttttttacagcgactgcggctatggggtgtgtcatgcgccatcgaaactgccggagacgcgccagccagcaagctgttaccgctggcgaaattgtgcgatgaagtgttgttcgatttaaaaattatggatgcggctcaggcgcgggatgtggtgaagatgaacctgcaacgcgtgctggagaatctgcgtttgctggtgagtgagggtgtcaacgtgatcccgcgtttaccgctgatccctggtttcacgctcagccgggagaatatgcagcaggcgctggacgtgctgatcccgctgaatatcaagcagatccatctgttaccgtttcatcagtacggcgagccgaaataccgcctgctggggaaaacatggtcgatgaaagaggtttctgcgccgtcgtcagccgatgtggcaacgatgcgtgaaatggcagaacgggccggatttcaggttaccgtgggaggttaaaatggcatatctggtggcagtaaccgcctgcgtaagcggcgtggcgcatacttatatggcggcggaacggctggaaaagttgtgccagttagagaagtggggcgttagcattgaaactcagggcgcgttgggaacggagaatcgtttagcggacgaggatatccgccgggcggatgttgcgctgttaattacggatatcgagcttgccggtgctgagcgatttgaacattgtcgctacgtgcaatgcagcatctacgctttcctgcgtgagccgcagagggtgatgagcgcagtgcgcaaagtgctttctgcgccgcagcaaacccatcttattctggagtagtcggtttttctgtcagttggctgtggtactgccgacgatattccgacggcgagcgttcggtatttttacgaaacagacggcagaagtagttgctgtcgacaaagccgcaggcgtgcgccacttcttttaccttcaggtcatagcctttcaataatgtcttagcgtgctccagtcgcgtgtgattcaggtattcgttaaaaccaatggcccccgttttttgaaacaggtgcgagaggtaatttggcgaaatatagaacgcctgtgcgacagattcgcgggtaagtgcggaggcatagcgttcgtcgatataatcacgaatagcttcgaatagagcctggctgcgtgaggcggtctgtatttggctgccgagcaaatcgcggcagtggctaagcaggctggcgacgataagtctggccgtttgctgctcctgcgactgcatttgcatttcattgagcgtttgtagcagaaaagaaccaatgcgcgggccgcgtcgggcgacgtgttgcttcgccagattttgatattgtttgccatcccattgcacaacgctgaagccgagttgctgtttgccaaacagcacgctaaaggtggtggcgggggcttgccattgtggaaaattccagccaccagcagggacgtacagcacatcgccgggaactaacgctgctccagcgccggtatcaataaactcaccttccagcacaatttccagccgtggaaaatcgacctgatacgcaagatcgggcaccgggccgttgctgctggcaaagtaaatctggcgcagggacagcgggccgttgatcaggcgggagagcagatagctgacgtcgtgatacatgttattcccttaggtatgtagacgggaaaacagtaactggcattatgaaaaaaggccacctgaaaagtgtggcctgatgggagttcgatgtaaacattgcgacagtttcagtcgccttgtattgccggatgcggcgtaaatgccttacccggcctaccgccgcgatctgtaggccggataagacgcgtcaagcgtcgcatccggcaaataacatctggctgataattactgattacccacctgatcgccatacggcagagtgtcgtaatcgatcagtgcgtttttcttatacgggttaccaatccagcgggtagtttctttgaactgcggattcaccactgaacgggttggatcgtaaccgtcgtaagataagcccgccaaatctgaccaggtgtggatcagttccgccaggctgtatttacgatcaacatcttgtgagaaatcacgcggatgagtcgcttgccatttttctgacgtccacagcaggaacggaatggtgtacatatgacgcgtcgggttgtcttcattacgcccctgagttttgtgcggcggcgtgtcgtaaacctcttcaccgtggtcagagaaataaaccaggaaaccgttcggatcggtcgctttaaagtctttaatcaggctggcaaccacgtgatcgttgtacaggttagcattgtcataatcattatatgactccagctcttctgcgtttaatcccggtggaacatgctctgtattaccgtcaaatttgccctgatcttccggataacggtacttgtacttgatatgcgtacccagcagatgaaggatgatcagtttcttcggcgcagggtccttcagcacttcctggaacggcttcagcacgttggtgtcatattcacgcgcactctgcgtacgttgctggttcatgtagtactgcttgtcggtctggcgcgaaaataccgtcagcatggtattgcgggcggtcatcgtctgctggttggtgatccagaaggttttataacccgcctgtttcatcatgttcatcagcgacggctgcgtcagatacagatccgggttcttttcattggcaaaggtcagcgcctgttgcaggatttcaatggtgtacggacgagacgtaaccacgttattaaacacggtcagattcggatcggttttatgcagcgcatccagctccggcgtggtttcacgcggataaccgtacagactcatgcgtccacgctgggtcgattcgccaattaccagcactaaggtgcgcggttcgttacccgattcatctttgaaattagccagcggcggcaaggcattattttcattcagtagctttgttagcgagtttagttgctgacgatactgataatagccggtcaggaattgccacggtgcggcaggctccatacgcgatgccaggttatccaacgttttctcaaacggcttgttcttgataaacgtattcatggcgatcggatgcagaatcaagccataaagcagggcaaaagagacaacataacgccacggctttggaatatagaccgggcgcaggcgtgtccacagcagaactgccaccgccgtataggccagcgcgataagcacaattttcaggctgaaatactggcttaaatactcgctggcttcgttggtgttggtttcgaacatcacaaacagaacgctctgcgagaactcctgaccgtagatgacgtaatagcacagcgccgccagagaggccgcccatagcaccacgccgatcactgcggcaataattttaatccgcttcggaaagaggaataccgggatcaaccacagcgaactgaataacagcgagtcgcgaatgccgttagtgccactataaccactgatgtaaataatggcctgtagcagagtagagaaaaaccaaaagtagagcagtgcccaacccagggctttccagctaaaaaggggtttagcctggacttctgtggaatgcatagtaagaacctgtcttgaaaaaaatatcgccgaatgtaacgacaattccttaaggatatctgaagggatatccagattttgaataaaatgcagacagaaatatattgaaaacgagggtgttagaacagaagtatttcagaaaaccctcgcgcaaaagcacgagggtttgcaggagaggaagattagccggtattacgcatacctgccgcaatcccggcaatagtgaccattaacgcctgctcgacgcgaggatccggttcctggccttctttttctgcctggcgggagcggtgcagcaactcggcctgcaatacgttcagcgggtcggtgtaaatattccgtagctgaatagactctgcaatccacggcagatcggccatcaggtgagaatcgttggcaatcgccagcaccactttgatgtcttcttcttgcagattgcgtaactctttacctaacggccacagtgctttgtctaccaggcgttggtcatagtattccgccagccacaggtctgctttggcgaagaccatctccagcatgccgagacgcgtcgagaagaatggccaatcgcggcacatggcttccagctcgctctgtttgccatcttcgaccactttttgcagcgccgtacctgcacccagccaggcggggagcatcaggcggttttgcgtccaggcgaaaatccacggaatagcgcgcagtgactcgacgccgccggttgggcgacgtttcgccggacgtgaacccaacggcagtttacccaattcttgttccggcgtagcggagcggaagtaaggcacaaaatctttgttttcacgtacgtagccacggtagagatcgcaggagatgactgacagttcatccataatgcgacgccagctctctttcggctcaggcggtggcagcaggttggcttccagaatcgccccggtgtacagcgacaggctgctgacggtgatttctggcagaccatatttaaagcggatcatctcgccctgttcggtcacgcgcaggccacctttcaggcttcctggcggttgtgacagcagcgccgcatgggcaggtgcgccgccgcgaccaatggaaccgccgcgaccgtggaacaacgtcagctcaatacccgctttttcgcaggttttgattaatgcatcctgtgcctgatattgcgcccaggaagctgccatcacgcccgcatcttttgctgagtcggaatagccaatcatcaccatctgtttgccctgaatcaggccgcgataccagtcgatattcagcagctgggtcatgacatcgttggcgttgttcaggtcatcgagggtttcaaacagcggagcaaccggcatcgcaaacccgatacccgcttctttcagcagcaggtggacagccagcacgtcggacggcgttttcgccatcgagatcacgtaggcggcaatggagccttgcggcgcttcggcaatcacctggcaggtatcgagcacttcgcgcgtttcggcgcttggttgccagttgcgtggtagaagcggacgtttggagttcagttcgcggatcaggaacgcctgtttgtcggcttctgaccagctttcataatcgccgataccgaggtagcgggtcagttcgcctaatgcttcggtatgacgcgtgctctcctgacggatatcaatacgcaccagcggtacgccgaaacatttcacgcggcgcagggtgtcgagcagatcgccattggcgataatacccatgccacacgcctgaagtgactggtagcaagcgtagagcggttcccacagttcttcgttttgtgtcagcagaccttctggttttggcaattcttcgcctttcaggcgcgcttccagccatgcctgtgtcgccatcaggcgagaacgcaggtttttcatcagatagcgatacggttctgcggcaccctcttcgccaaccagcgccagcagttcaggggtggcttcaaccatcgacagttcagaaaccagaacctgaatatctttcaggaacaaatcggtggctttccagcggctgagtagcaggacgtggcgggtgatatcggcagtgacgttcgggttgccgtcgcggtcaccgcccatccacgaggtaaaacggaccggaacaaattcgacgggcagtttgtagccgaggttctcttccagttgttcgttcagttcgcgcaggtaattcggtacgccttgccacaggctgttttctactacggcaaagccccatttggcttcatctaccgggcttgggcgcagtttacggatttcatcggtatgccatgactgggcgatcaactggcgcaggcggcgcatcagctggttgtgttcgtagtcggcgatatctttgttatcgagctgttttaaacaggcgttcacttccaccattttgtggatcagtgtacgacgggtaatttcggttgggtgagccgtgaggaccagttccagcgacagcgattccactgcttttttgatggtgtcttcgctcagttccggctggtttttcagtttacgcagggtgcgggcgatcacttccgggttgctggcagcttcgcctttcggcgaaatgctgtggtattgctcagcggtgttggccaggttcaggaactgactaaacgcacgcgcaacgggcagcagctcgtcgttcgacaaattttgtaaggtggtgagcaactcctggcggttagcatcattgccagcgcgtgaagatttggacaacttacggatagtttctacgcgttcaagaatgtgttctcccaacgcatccttgatggtttctcccagcactttgccgagcatactgacattactacgcaatgcggaatattgttcgttcatattaccccagacaccccatcttatcgtttgatagccctgtatccttcacgtcgcattggcgcgaatatgctcgggctttgcttttcgtcgtcttttataaagccacgtaaaagcggtgacgtcaaatgctgcgaaatcgcttcagcaaacgaataaatagcaggaatttacgccattaaattcacgacgctttaaataagcgtaacttatgggaatgttaaaaaatcgcctcgaataacaccaaaggtgtaggtcggataagatgcgcaagcatcgcatccgacattgtttggcctacgttttaatgccagcaaaaatggtgaatcacctgggtgatcagttcgcgggtgggcttgataaacctcgtctccagatattcatcaggctgatgagcctgattaattgagccaggccccagaaccagcgtcgggcataacgtttgaataaacggcgcttcggtacagtaattcaccacttcggtctttgctccgagcaatttctcaaccacttcaaccagttgatgattcggtgggcattcatagccagggatcggcggatgcagctcgtcgaccgtcagacgacccggccagcgttcgctcactggagccaatgcatcgttgagcaaaccgttaagttcattgagtgtcatgcctggcagcggacgaatatccatatgcaactcacaacaagcgcaaatacggttagatgcatcgccgccgtggatatgcccgaggttgagcgtagggtatggcacggtaaacgcgtcgtagtgataacgttctttcaggttatcgcgcaattgcaaaatatgccctatggcgtcgtgcatcagttcgatagcgttaactccgcgtgctggatcgctggagtggcccgactggccctgaatacggatggcgttagagatatgacctttatgcgcgcgtaccggttgcagcgacgttggctcgccaatgatggcgcaatccgggcgcagggcggtagtttcggcaaaataacgcgctccggccatactggtttcttcatcggcagtcgccagaatgtagagcggttttgcaagcttcgtgacgtcgacatcgcgtagcgcatcaaggataaacgcaaaaaagcctttcatgtcggcggtgcctaagccgtaaagcttgccgtcatgctccgtcaacgtaaatggatcgcgcgtccagcgtccgtcatcaaatggcaccgtatcggtatgccccgccagcaacaaaccgccagccccctgtccgcaactggccagcatattaaatttgttgcgagttcctggcacaggctgtacttccacattgaagcctaaatccttaaaccagtccgccagcagagtgattaaatctgcattgctttgatcgagtgcctcttccgtggcgcttattgaaggtgtggcaatcagagcacggtaaatctcgataaatggcggtaatttgtttttcattgttgacacacctctggtcatgatagtatcaatattcatgcagtatttatgaataaaaatacactaacgttgagcgtaataaaacccaccagccgtaaggtgaatgttttacgtttaacctggcaaccagacataagaaggtgaatagccccgatgttgaatacgctgattgtgggtgccagcggctacgctggcgcagagctagtgacctatgtaaatcgccatccgcatatgaacataaccgctttgactgtttcagcgcaaagcaatgatgcgggaaagttaatctccgatttgcatccgcagctaaaaggcatcgttgatctgccgttgcagccgatgtcggatatcagcgagtttagcccaggggtggacgtggtgtttctcgccaccgcccatgaagtcagccacgatttagcgccgcaatttcttgaagcaggctgtgtggtgttcgacctttccggcgcgtttcgtgttaacgatgtcgccttctatgaaaaatattacggctttacccatcaatacccggaactgctggaacaggcagcctacggtctggcggagtggtgcggtaataaattaaaagaagcgaacttgattgccgtgccaggctgttatccgacggcagcacagctggcgctgaaaccgttgattgatgccgatcttcttgacctcaatcagtggccggtgatcaacgccaccagcggcgtgagcggtgcaggacgtaaggcagcgatttcaaatagtttttgtgaagttagcctgcaaccgtatggcgtctttacccatcgccatcaaccagagatcgccacacacctcggtgctgacgttatcttcaccccgcatctgggcaatttcccgcgcggcattctcgaaaccattacctgccgcctgaaaccgggtgtgagccaggtgcaagtggcgcaagcgttacagcaggcgtatgcccataaaccactggtgcggctgtatgacaaaggcgttccggcgctgaaaaatgtcgttggactgccattctgcgatatcggttttgccgttcagggcgagcatctgattattgtggcgaccgaagacaacttactgaaaggcgcggcggcacaagcggtgcagtgcgccaatattcgtttcggctatgcggaaacgcagtctcttatttaagggtgcaatgatgaatccattaattatcaaactgggtggcgtactgctggatagtgaagaggcgctggaacgtctgtttagcgcactggtgaattatcgcgagtcacatcagcgtcagctggtgattgtgcacggcggcggttgcgtggtggatgagctgatgaaagggctgaatctgccggtgaaaaagaaaaatggcctgcgggtgacgcctgcggatcagatagacattatcaccggagcactggcgggaacggcaaataaaaccctgctggcatgggcgaagaagcatcagattgcggccgtaggtttgtttctcggtgacggcgacagcgtcaaagtgacccagcttgatgaagagttaggccatgttggactggcgcagccaggttcgcctaagcttatcaacagcttgctggagaacggttatctgccggtggtcagctccattggcgtaacaaacgaagggcaactgatgaacgtcaatgccgaccaggcggcgacggcgctggcggcaacgctgggcgcggatctgattttgctctctgacgtcagcggcattctcgacggcaaagggcaacgtattgccgaaatgaccgccgcgaaagcagaacaactgattgagcagggcattattactgacggcatgattgtgaaagtgaacgcggcgctggatgctgcgcgcacgttgggccgtccggtagatatcgcctcctggcgtcatgcggaacagcttccggcactgtttaacggtatgccgatgggtacgcggattttagcttaagttttgttggccggaggcgcagctttccggcattgaatttcaaaataaggaaacagagttatggcactttggggcgggcgttttacccaggcagcagatcaacggttcaaacaattcaacgactcactgcgctttgattaccgtctggcggagcaggatattgttggctctgtggcctggtccaaagccctggtaacggtcggcgtgttaaccgcagaagagcaggcgcaactggaagaggcgctgaacgtgctgctggaagatgttcgcgccaggccacaacaaatccttgaaagcgacgccgaagatatccatagctgggtggaaggtaaactgatcgacaaagtgggtcagttaggcaaaaaactgcataccgggcgtagccgtaatgatcaggtagcaactgacctgaaactgtggtgcaaagataccgttagcgagttgctgacggctaaccggcagttacaatccgctctggtcgagaccgcgcagaacaatcaggacgcggtgatgccgggttacactcacctgcaacgcgcccagccggtgacgttcgctcactggtgcctggcctacgttgagatgctggcgcgtgatgaaagccgtttgcaggacgcgcttaagcgtctggatgtcagcccgctaggttgtggcgcactggcaggaacggcctatgaaatcgaccgtgaacagttagcaggctggctgggctttgcttcggcgacccgtaacagtctcgacagcgtttctgaccgtgaccatgtgttggaactgctttctgctgccgctatcggcatggtgcatctgtcgcgttttgctgaagatctgattttctttaacaccggcgaagcggggtttgtggagctttctgaccgtgtgacttccggttcatcattaatgccgcagaagaaaaacccggatgcgctggagctgattcgcggtaaatgcggtcgggtgcagggggcgttaaccggcatgatgatgacgctgaaaggtttgccgctggcttacaacaaagatatgcaggaagacaaagaaggtctgttcgacgcgctcgatacctggctggactgcctgcatatggcggcgctggtgctggacggcattcaggtgaaacgtccgcgttgccaggaagcggcgcagcagggttacgccaacgctactgaactggcggattatctggtggcgaaaggcgtaccgttccgcgaggcgcaccatattgtgggtgaagcggtggtggaagccattcgtcagggcaaagcgctggaagatctgccgctcagtgagttgcagaaattcagccaggtgattggcgaagatgtctatccgattctgtcgctgcaatcgtgcctcgacaagcgtgcagcaaaaggcggtgtctcaccgcaacaggtggcgcaggcgattgcttttgcgcaggcgcggttggggtaatttgtttatattgctcccctgaaaatggggagcttaccacgcctacaaagtgtgacacttcgtaggcggataaggcgtttacgccgcatcaggcagaaatttgtcagtattctggtgaccttaaatttaacgcccaaccagaaccattatttgtcacattcctttttattcttgcgtcttctttaccttcactctccccataaaaattatattttcaatacatcagccaatacatactttaattaattgaatataatttatttctattgttgtgttcatttttaatgattaatggagtttgttatgtgattatttaacgtgttgttttaacgatgatggctaattattcaggtggtttttgagggtgttttttctcctcggtagaaatttttatttttaatgtgatcacggttgaataatcactttttctctcttgtatggtagtaggcgtaaaattaagtttgaagtgtctatttacaatacaggagattgcaataatgaaaattattgctgtggatgtttttgttacttgtcccgggcgtaatttcgttacgcttaaaataaccactgaaagcggactttgtggattaggagatgccacgttaaatggtcgcgaattgtcggtcgcttcttatctgaaagatcatctttgtcctcaattaattggccgcgatgccagccgtatcgaagatatctggcaattcttttataaaggagcttactggcgacgtggtcccgtcacgatgtcggccatttctgccattgatatggcgttgtgggatatcaaagctaaagcggcaaatatgccattgtatcaactgcttggtggcgcttctcgtgaaggcgtgatggtttattgccacaccaccgggcggacgattgatgaagtccttgaagactatgcaaagcaccagcagatgggctttaaggcgattcgtgtgcagtgtggtgtaccgggtatgcaaaccacctatggtctggcgaagggcaaaggactggcgtatgaaccagcaaccaaaggcctgtggccagaagagcagttgtggtcttcagaaaagtatctcgattttacgccgaagttatttgaagcggtgcgtaataagttcggttttaacgaacatctgttgcatgacatgcaccatcgcctgacccccatcgaagcggcgcgctttgggaggagcattgaggattaccgcctgttctggatggaagatccgacgcctgccgagaaccaggaatgttttcgtctgattcgccagcataccgtgacgccgattgcggtcggtgaagtgtttaacagtatctgggactgcaaacagttaatcgaagagcagctgattgactatattcgcacgacgattacccatgcaggcggcattaccgggatgcgacggattgccgattttgcatcgctttatcaggtacgtaccggttcgcatggcccttcagatttatcgcctgtttgtcatgcggcggcgctgcattttgacctctgggtgccaaactttggcgttcaggagtacatgggctattccgaacaaatgcttgaagtcttcccgcacagctggcgcttcgatgaaggttatatgcacccaggcgatgaaccggggctgggtatttctttcgatgagaaactggcggcgaaatatccgtatgacccggcgtatctccccgtcgcacgactggaagatggcacattgtggaactggtaatagcggttcgcttaattattttctgaatattcatcaaatcgattaattccgctcaaggagctaaaaatggacgttgatgtgtcaaccagtgttgcgggtaataaaccgcaacggattcgtcgtattcagacagtgaccctggttttattatttatggcggggatcgttaattttctcgaccgttcgtcattgagcgtggcaggtgaagcaattcgtggcgagttaggattatccgctaccgagtttggtgttttgctttctgcattttctctgtcttatggtttttcacaacttccttccggtattttgctagaccgctttggcccacgaatagtgttaggcgcaggcttaatattctggtcattaatgcaggcattaacaggaatggttaattcttttagccactttattttaatgcgtatcggtctgggtattggcgaagcgccatttatgcctgcgggagtaaagtcgatcaccgactggtatgcgcaaaaagaacgcggcacggcgctggggatttttaactcatctaccgttatcggtcaggctatcgcgcctcctgctcttgtattgatgcaactggcatggggctggcggacgatgtttgtcatcatcggcgtagcagggattctggttgggatctgttggtacgcgtggtatcgcaaccgggcgcagtttgtcctgaccgaggaagaacggacatatctctccgcgccggttaaaccgcgtccacagttacaatttagcgagtggctggcgctgtttaagcatcggacaacctgggggatgattttaggtttctctggcgtcaattataccggttggctctacatcgcgtggttacccggttatttgcaggccgaacaaggtttcagtctggcgaaaaccggttgggtggcggcaattcctttcctcgcggcggcggtcgggatgtgggttaacggtattgttgtcgatcggctggcgaaaaaaggctatgacctggcgaagacgcgtaaaacggctattgtctgcggtttgatgatgtcggcattaggcacgttgctggtcgtgcaatcttcctcgccagcccaggcggtagcgtttatctcaatggcgctgttctgcgtgcatttcgcgggaacatctgcatgggggctggtgcaggtgatggtgtcagaaacaaaagtggcttccatcgccgggattcaaaactttggcagttttgtttttgcttcctttgctccgatcgtaaccggttgggtcgtggataccacacactcgtttaatctggcgctggttatcgcggcctgtgtgacgttcaccggggcgctgtgttacttctttattgtcaaagatcggattgagtaaccgttactatcaggctctcttgctgtgggcctgtagaataaaaaaaagcggatcctggagatccgcaaaagttcacgttggctttagttattcgagttgagaaactctcgaaacgggcagtgacttcaagggttaaaagaggtgccgctccgtttctgtgagcaattatcagtcagaatgcttgatagggataatcgttcgttgctatgctacctatcgccgcgaactatcgtggcaatggaggatggataatgaatattcgtgatcttgagtacctggtggcattggccgaacaccgccattttcggcgtgcggcagattcctgccacgttagccagccgacgcttagcgggcaaattcgtaagctggaagatgagttgggcgtgatgttgctggagcggaccagccgtaaagtgttgttcacccaggcgggaatgctgctggtggatcaggcgcgtaccgtactgcgtgaggtgaaagtccttaaagagatggcaagccagcagggcgagacgatgtccgggccgctgcatattggtttgattcccacggttggaccgtacctgctaccgcatattatcccgatgctgcaccagacctttccaaagctggaaatgtatctgcatgaagcacagacccaccagttactggcgcaactggacagcggcaaactcgattgcgtgatcctcgcgctggtgaaagagagcgaagcattcattgaagtgccgttgtttgatgagccaatgttgctggctatctatgaagaccacccgtgggcgaaccgcgaatgtgtaccgatggccgatctggcaggggaaaaactgctgatgctggaagatggtcactgtttgcgcgatcaggcaatgggtttctgttttgaagccggggcggatgaagatacacacttccgcgcgaccagcctggaaactctgcgcaacatggtggcggcaggtagcgggatcactttactgcctgcgctggctgtgccgccggaacgcaaacgcgatggggttgtttatctgccgtgcattaagccggaaccacgccgcactattggcctggtttatcgtcctggctcaccgctgcgcagccgctatgagcagctggcagaggccatccgcgcaagaatggatggccatttcgataaagtgttaaaacaggcggtttaagccatttagcgcagctacccgataggcttccgccatcgtcgggtagttaaaggtggtgttgacgaagtactcaatagtgttgccgccacctttctgttccataatcgcctgaccgatatgaataatttcggcagcgcgctcgccaaagcagtgaatacccagaatctcttttgtttcccgatggaacaaaattttcagcgtgcccacgttcatgccgacgatttgtgcacgtgccagatgtttaaactgggcgcggcccacttcatatggcactttcatcgcggtcagctgctgttcggttttgcctacagagctgatttccgggatggtgtaaatgccggtagggatatcttcaatcagatgtgcgttggcttcacctttcaccagcgcctgcgcggcaatgcgcccctggtcataggctgccgacgccaggctcggataaccaatcacgtcgcccaccgcgtaaacgtgcggctgtgcggtctgatacatgctgttgaccttcagctgtccgcgactgtcagtttccagcccaatgttctgtaacgccagcgaatcggtattaccggtgcgaccgttggcatagagcagacagtcagctttcagttttttacccgacttcagatgcatgatcacaccgtcgtcacagccttcgatcttctcgtactcttcgttgtgacgaatcactacgccactgttccagaagtgataggagagagaatctgacatctcttgatcgagaaatgccagcaggcgatcgcgggtgttgatcagatccacttttacatccataccgcggaagatcgacgcatattcacagccgatcactccagcaccgtaaataagtacatggcgcggttcgtggtgcatgctaagaattgagtcgctgtcataaatgcgtggatgggtgaaatcaacatctgttggatgatatggacgagagccgcaggcaataacaaatttttcagcagttagtgtttcgacgctgccgtccgggcaatccagcgccaacgtatgctcatcaacaaagcgagcgttcccctgcaatatttcacagtgattacgttcgtaaaatccctgacgcatgcgcgtttgttgattaatcacgttatcggcatggttaaggatatcggcaaaagaagagcggagcagtcgggaatggtcgctgtatagtgggttttgattgaattctataatgcggctgacggcgtgacggagagctttcgacgggatggtgccccagtgggtgcaaccgccgccaacattttgataacgctcgataactgcgacgcgcgcaccttgcttaaccaggcccatcgcagcgccttcgccgccggggccggaacctattactatggcatcgtaatcgtaggaatgtggcatggtagggcttacctgttcttatacataaaagcaacagaatggtaacattttatcgcgggtaagccaattgatccccgtcatttatctggctatatcgtgagcggcctttgctttgtcttcctccttcttattttatttattcactattaatcgctttttcttatggctgatagttttatcttgccgaagcgtgcttttttgttattgtctttatgaaatcttcttataaaacaaatatataaatattttatattgatgagttatttgtatttataccatcaataaaatccgttaattagcctgtttataagtgaataaaggaatagccgatgatcgaacactatattcgtgggtttgaggaagaacttcgcgagatccgccatcagatccacgaaaacccggagctgggattacaagaatttaaaaccagtgctttggttgcggaaaagctgcgccagtggggctatgaggttgagcaagggctggcgacaaccggcgtggtagccacgttaaaagtgggcgacggagagaaaagtattggcctgcgggcggatatggatgcgttgccgatttatgaaaatagtggcaagccctgggccagtaaacatcctggtttaatgcacgcctgcgggcatgacgggcataccaccatactgctgggggctgcgcgttattttgccgaaacccgccgttttaacggcacgttacgccttatcttccagcctgcggaagagatgattaacggcggtgagatcatggttaaagaggggctttttgatcgtttcccctgcgatgtcattttcgggatgcacaacatgccgggtttgccggtcggcaagtttttcttccagcctggggcgctgatggcgtcaatggatcagttccatattacggttcgtggttgtggcggacacggtgcgatcccgcacaaagccatcgatccagtgctggttgctgcacatatcaccaccgcattacaaagcattgtgtcgcgcaatgtcgatccgctggaagcggcggtaattaccgtcggcagcattgttgcgggtgaggcggctaacgtcattcctgacagtgctgagatgaaaatcagtgtccgctctcttagccgcgatacccgacaacttcttctgacccgtattcctgctcttgcacaagcccaggctgccagctttggcgctacggctgaggttacgcatgttaacggtacaccggtattagtaaatgacgaggagatggcgcgcttcgcctggcaggtggcgtgcaaaacatttggtgaagatcgggctgagtttggcatcaaacccctgatgggcagtgaagatttctctttcatgctggaagcccaacccaaaggcggtttcctgttattcggtaatggcgatgtcggggaaggttcctgcatggtgcataaccccggttacgactttaacgatgcaagcctggtcccggcaagcagctactggggcgcactggttgaagcctggctgcaataaataaaacaacacacaacaacactttttggcaaggaacatggaatgacggcgatcgtaaatgaaaccgtgagtgtgaagaaaaagcccagcggcaggcgggtgatctttgcctcggcgtttggcaatgcgctcgaattttttgattttggcgtttacaacttttttgtggtctatatcagtacgcttttcttcccacccagtgccgatcataacgtcgcgctgttactggcatttgcaacgtttggtgtgagcttttttatgcgtccgctcggtgggattatcgttggtgcctgggccgatcgcttcgggcgtaaaccggcgatggtgttcactattgctctgatgagcctcggtacgctgatgatcggcatcgcaccgacgtatgaaacggcgggctattggggaaccgcaacgctggtgctggcgcgtctaattcagggtgttgcggcaggtggtgaagtcggggcttcaatgtcgctactggtggagtcagctccggcaaatcgtcgcggcttttacagcagttggtcactggcgacccaagggctggcaacgaccttcggtggggttgttgctttaggtctgagcgcatggctaccgttcgccacaggttcagaaaccgtaatggcagaatggggctggcgtgtgccgttttttattggcgtgttattagcacctatcggttgctggttgcgtctgagcctggaaaatgacgtacctgagccagtgcgcaataaaaaagctgctaccagcgaaagcgcgttttctctgctcctgcaacataaggcgactatcgttaatggcgttttactcgctattggtagcacggtcgcaacctatatctccctcttttattacggcacctgggcggcgaagtatctggcgatgcctcaacattattctcatgcagcgatgttactggcgggggtaattacgtttgtgggtgcgctgttggtggggatgctatgtgattcggttgggcgtaaaaagctgattttaatctcccgtgtgatggtgcttctctgtagctggccgtcattctggctgttggtgaattacccaagccctggcatgttgctgacggtggttttcgtgatggtcagctttaccacgcttggcggtgtgccagtgatgttgttgatctctgaactgttgccgaaacggattcgggcattaggtttcgcgctggtttatagcattggcgtagcaatctttggcggttttgcgcaatatttcgccacgcaatccatcgtgttgctggatagtctgacggctccggcgtggtatctggggggaggcacgttgctgtcgatgctggcgttgttgtacgtaaaagaaccggccaaagaattgcagtaaatatgttttattgcgttaccgttcattcacaacactggagcaatccagtatgttcattctctggtatagtgccagcagtacttttggcaaggattcagacatcgtgatgggcgtaagagcgcaacaaaaagaaaaaacccgccgttcgctggtggaagccgcatttagccaattaagtgctgaacgcagcttcgccagcctgagtttgcgtgaagtggcacgagaagcaggcattgctcccacctctttttatcggcatttccgcgacgtagacgaactgggtctgaccatggttgatgagagcggtttaatgctacgccaactcatgcgtcaggcgcgtcagcgtatcgccaaaggcgggagtgtgatccgcacctcggtctccacatttatggagttcatcggtaataatcctaacgccttccggttattattgcgggaacgctccggcacctccgctgcgtttcgtgccgccgttgcgcgtgaaattcagcacttcattgcggaacttgcggactatctggaactcgaaaaccatatgccgcgtgcgtttactgaagcgcaagccgaagcaatggtgacgattgtcttcagtgcgggggccgaggcgttggatgtcggcgtcgagcaacgccggcaattagaagagcgactggtactgcagctgcgaatgatttcgaaaggggcttattactggtatcgccgtgaacaagagaaaaccacaattattccgggaaatgtgaaggacgagtaatgaaacaagcaaatcaagatagaggtacgctgctgctagcgttggttgctggcttatcgatcaatggtacttttgcagcgctgtttagctccattgtaccattttctgtattcccgattatttccctggtgttgacagtttactgcctgcatcaacgttatcttaatcgcactatgccggtaggcttgccgggtctggcagctgcttgttttattctcggcgtactgctgtacagcacggtagttcgtgcggaatatccggatatcggctctaacttcttcccggcagtactgtccgtcattatggtgttctggattggcgcgaagatgcgtaaccgtaagcaggaagttgctgagtaatcggtatcatgccggatgcaagcgcatccggcatgggttttacttcgcggtcagtaatacgccgcactccatatggtgcgtgtaggggaactgatcaaatagagccagacgttcgaccttgtgcgtctggcttaatgtttccagattcttgcataacgtttccggattgcaggagatatacagaatacgtggatacgcctgcaccattttctcggtttcactgtccagaccgctgcgcggtgggtcgacaaaaatggtttcgcactgataactctttaagtcgattccttgcaggcggttaaactcgcgcacaccattcatcgcctgagtaaattcttctgccgccatacgaataatttgtacgttatcaatatggttagcggcaatgttgtattgcgcggcggcgactgacggcttggcgatttcggtggctaatacccgatcaaaattgcgtgccagcgctaatgaaaagttaccgttgccgcagtatagctccagtaaatcgccttttgagcctttggttacgtccagcgcccattccagcatctgaatattcatcgccgcgttcggttgggtaaagctgttttctacctgacggtagatcatctctttccccgcgatcggcagacgttcgtcgatgtaatcctgatccagcgcgattttggttttcgttgcccgaccaatcagatgcacattcagattctgcgcgcgcagtgcatcgcgcagggcttccgcctgctgacgccactcatcatccagctttttatggtacagcaaggaaacaaccgcttgattgcttagcgtagtgaggtaatcaatctggaacaacttgtggcgcagaatgggattattacgcacacccgcaatcatcgccgtcatcaactggttgataagttcactggcggcggggaagctatccacacggatacgacttttggtttgttgatcgaaaatgatgtggtacaggtcatcgccatcgtgccagatgcggaactccgcacgcatccgataatgactgaccggcgagcgaaacacttccggaaccaggtcagaaaacggtgccatcatactttgcaaacgtaccactttttcggctaactgcgcttcatactgttctgttggaaggtgttcgggggtcatgatgtatcctgaaaaattaaagtacgcggcgattgtagggattgctcatcagatgtccagatcttgatgaattcctatttgtgagctacgtctggacagtaacttgttacaacctgtagcatccacttgccggtcctgtgagttaatagggaatccagtgcgaatctggagctgacgcgcagcggtaaggaaaggtgcgatgattgcgttatgcggacactgccatccggtgggaagtcatcatctcttagtatcttagatacccctccaagcccgaagacctgccggccaacgtcgcatctggttctcatcatcgcgtaatattgatgaaacctgcggcatccttcttctattgtggatgctttacaatgattaaaaaagcttcgctgctgacggcgtgttccgtcacggcattttccgcttgggcacaggataccagcccggatactctcgtcgttactgctaaccgttttgaacaaccgcgcagcactgtgcttgcgccaactactgttgtgacgcgtcaggatatcgaccgctggcagtcgacctcggtcaatgatgtgctgcgccgtcttccgggcgtggatatcacccaaaacggcggttcaggtcagctctcatctatttttattcgcggtacaaatgccagtcatgtgttggtgttaattgatggcgtccgcctgaatttggcgggggtgagtggttctgctgatcttagtcagttccctattgcgcttgtccagcgtgttgaatatatccgtgggccgcgctccgctgtttatggttcagatgcaataggcggggtcgtgaatatcatcacgacgcgcgatcaccccggaacggaaatttcagcagggtggggaagcaatagttatcagaactatgatgtctctacacagcaacaactgggggataagacacgggtaacgctgttgggcgattatgcccatactcatggttatgatgttgtcgcctatggtaataccggaacgcaagcgcagccagataacgatggttttttaagtaaaacgctttatggcgcgctggagcataattttactgatgcctggagcggctttgtgcgcggctatggctatgataatcgtaccaattatgacgcatattattctcccggcttgccactggtcgatacccgtaaactctatagccaaagttgggatgccggactgcgctataacggcgaactgattaaatcacaactgattaccagctacagccatagcaaagattacaactacgatccgcattatggtcgttatgattcgtccgcgacgctcgatgagatgaaacagtacaccgtccagtgggcaaacaacatcatcattggccacggtaatattggtgcgggtgttgactggcagaagcagagcacggcaccgggcacagcttatgttgaggatggatatgatcaacgtaataccggcatctatctgactgggctgcagcaagtcggcgattttacttttgaaggcgcaggacgcagcgacgataattctcagtttggtcgtcatggtacctggcaaaccagcgccggttgggagttcatcgaaggttatcgctttattgcttcctacggaacatcttataaggcaccaaatcttgggcaactgtacggctcctacggtaatccgaatctgaatcctgagaaaagcaaacaatgggaaggcgcgtttgaaggcttaactgctggggttaactggcgtatttccggatatcgtaacgatgtcagtgacttgatcgattatgatgatcacaccctgaaatattacaatgaagggaaagcgcggattaagggtgtcgaggcgaccgctaattttgataccggaccactgacgcatactgtgagttatgattatgttgatgcgcgcaatgcgattactgacacgccgttgttacgccgtgctaaacagcaggtgaaataccagctcgactggcagttgtatgacttcgactgggggattacttatcagtatttaggcactcgctatgataaggattactcctcttatccttatcaaaccgttaaaatgggcggtgtgagcttgtgggatcttgcggttgcgtatccggtcacctctcacctgacagttcgtggtaaaatagccaacctgttcgacaaagattacgagacagtctatggctaccaaactgcaggacgggaatataccttgtctggcagctacaccttctgaaccacgtcccaccgtgctggtgtttgactccggcgtcggtgggttgtcggtctatgacgagatccggcatctcttgccggatctccattacatttatgctttcgataacgtcgctttcccgtatggcgaaaaaagcgaagtgtttattgttgagcgagtggtggaaattgtcaccgcagtgcaagaacgttatccccttgcgctggctgtggtcgcttgcaacaccgccagtaccgtttcacttcctgcattacgcgaaaagttcgacttcccggttgttggtgtcgtgccggcgattaaacctgctgcacgtctgacggcaaatggcattgtcggattactggcaacccgcggaactgttaaacgttcttatactcatgagctgatcgcgcgtttcgctaatgaatgccagatagaaatgctgggctcggcagagatggttgagttggctgaagcgaagctgcatggcgaagatgtttctctggatgcgctaaaacgtatcctacgcccgtggttaagaatgaaagagccgccagatacagttgtattgggttgcacccatttccctctactacaagaagaactattacaagtgctgccagagggaacccggctggtggattctggcgcagcgattgctcgccgaacggcctggttgttagagcatgaagccccggatgcaaaatctgccgatgcgaatattgcattttgtatggcaatgacgccagaagctgaacaattattgcccgttttacagcgttacggcttcgaaacgctcgaaaaactggcagttttagattgatttggttgaatgttgcgcggttagaaaattattttaaatttcctcttgtcaggccggaataactccctataatgcgccaccactgacacggaacaacggcaaacacgccgccgggtcagcggggttctcctgagaacttcggcagagaaagcaaaaataaatgcttgactctgtggcgggaaagcgtattatgcacaccccgcgccgctgagaaaaagcgaagcggcactgctctttaacaatttatcagacaatctgtgtgggcactcgaagatacggattcttgacgtcgcaagacgaaaaaatgaataccaagtctctgagtgaacacgtaattcattacgaagtttaattcacgagcatcaaacttttaaattgaagagtttgatcatggctcagattgaacgctggcggcaggcctaacacatgcaagtcgaacggtaacaggaagcagcttgctgctttgctgacgagtggcggacgggtgagtaatgtctgggaaactgcctgatggagggggataactactggaaacggtagctaataccgcataacgtcgcaagaccaaagagggggaccttcgggcctcttgccatcggatgtgcccagatgggattagctagtaggtggggtaaaggctcacctaggcgacgatccctagctggtctgagaggatgaccagccacactggaactgagacacggtccagactcctacgggaggcagcagtggggaatattgcacaatgggcgcaagcctgatgcagccatgccgcgtgtatgaagaaggccttcgggttgtaaagtactttcagcggggaggaagggagtaaagttaatacctttgctcattgacgttacccgcagaagaagcaccggctaactccgtgccagcagccgcggtaatacggagggtgcaagcgttaatcggaattactgggcgtaaagcgcacgcaggcggtttgttaagtcagatgtgaaatccccgggctcaacctgggagctgcatctgatactggcaagcttgagtctcgtagaggggggtagaattccaggtgtagcggtgaaatgcgtagagatctggaggaataccggtggcgaaggcggccccctggacgaagactgacgctcaggtgcgaaagcgtggggagcaaacaggattagataccctggtagtccacgccgtaaacgatgtcgacttggaggttgtgcccttgaggcgtggcttccggagctaacgcgttaagtcgaccgcctggggagtacggccgcaaggttaaaactcaaatgaattgacgggggcccgcacaagcggtggagcatgtggtttaattcgatgcaacgcgaagaaccttacctggtcttgacatccacggaagttttcagagatgagaatgtgccttcgggaaccgtgagacaggtgctgcatggctgtcgtcagctcgtgttgtgaaatgttgggttaagtcccgcaacgagcgcaacccttatcctttgttgccagcggtccggccgggaactcaaaggagactgccagtgataaactggaggaaggtggggatgacgtcaagtcatcatggcccttacgaccagggctacacacgtgctacaatggcgcatacaaagagaagcgacctcgcgagagcaagcggacctcataaagtgcgtcgtagtccggattggagtctgcaactcgactccatgaagtcggaatcgctagtaatcgtggatcagaatgccacggtgaatacgttcccgggccttgtacacaccgcccgtcacaccatgggagtgggttgcaaaagaagtaggtagcttaaccttcgggagggcgcttaccactttgtgattcatgactggggtgaagtcgtaacaaggtaaccgtaggggaacctgcggttggatcacctccttaccttaaagaagcgtactttgcagtgctcacacagattgtctgatagaaagtgaaaagcaaggcgtcttgcgaagcagactgacacgtccccttcgtctagaggcccaggacaccgccctttcacggcggtaacaggggttcgaatcccctaggggacgccacttgctggtttgtgagtgaaagtcacctgccttaatatctcaaaactcatcttcgggtgatgtttgagatatttgctctttaaaaatctggatcaagctgaaaattgaaacactgaacaacgagagttgttcgtgagtctctcaaattttcgcaacacgatgatgaatcgcaagaaacatcttcgggttgtgaggttaagcgactaagcgtacacggtggatgccctggcagtcagaggcgatgaaggacgtgctaatctgcgataagcgtcggtgaggtgatatgaaccgttataaccggcgatttccgaatggggaaacccagtgtgtttcgacacactatcattaactgaatccataggttaatgaggcgaaccgggggaactgaaacatctaagtaccccgaggaaaagaaatcaaccgagattcccccagtagcggcgagcgaacggggaggagcccagagcctgaatcagtgtgtgtgttagtggaagcgtctggaaaggcgtgcgatacagggtgacagccccgtacacaaaaatgcacatattgtgagctcgatgagtagggcgggacacgtggtatcctgtctgaatatggggggaccatcctccaaggctaaatactcctgactgaccgatagtgaaccagtaccgtgagggaaaggcgaaaagaaccccggcgaggggagtgaaaaagaacctgaaaccgtgtacgtacaagcagtgggagcctcttaatggggtgactgcgtaccttttgtataatgggtcagcgacttatattctgtagcaaggttaaccgaataggggagccgaagggaaaccgagtcttaactgggcgttaagttgcagggtatagacccgaaacccggtgatctagccatgggcaggttgaaggttgggtaacactaactggaggaccgaaccgactaatgttgaaaaattagcggatgacttgtggctgggggtgaaaggccaatcaaaccgggagatagctggttctccccgaaagctatttaggtagcgcctcgtgaattcatctccgggggtagagcactgtttcggcaagggggtcatcccgacttaccaacccgatgcaaactgcgaataccggagaatgttatcacgggagacacacggcgggtgctaacgtccgtcgtgaagagggaaacaacccagaccgccagctaaggtcccaaagtcatggttaagtgggaaacgatgtgggaaggcccagacagccaggatgttggcttagaagcagccatcatttaaagaaagcgtaatagctcactggtcgagtcggcctgcgcggaagatgtaacggggctaaaccatgcaccgaagctgcggcagcgacactatgtgttgttgggtaggggagcgttctgtaagcctgtgaaggtggcctgtgagggttgctggaggtatcagaagtgcgaatgctgacataagtaacgataaagcgggtgaaaagcccgctcgccggaagaccaagggttcctgtccaacgttaatcggggcagggtgagtcgacccctaaggcgaggccgaaaggcgtagtcgatgggaaacaggttaatattcctgtacttggtgttactgcgaaggggggacggagaaggctatgttggccgggcgacggttgtcccggtttaagcgtgtaggctggttttccaggcaaatccggaaaaccaaggctgaggcgtgatgacgaggcactacggtgctgaagcgacaaatgccctgcttccaggaaaagcctctaagcatcaggtaacatcaaatcgtaccccaaaccgacacaggtggtcaggtagagaataccaaggcgcttgagagaactcgggtgaaggaactaggcaaaatggtgccgtaacttcgggagaaggcacgctgatatgtaggtgaagcgacttgctcgtggagctgaaatcagtcgaagataccagctggctgcaactgtttattaaaaacacagcactgtgcaaacacgaaagtggacgtatacggtgtgacgcctgcccggtgccggaaggttaattgatggggttagcggtaacgcgaagctcttgatcgaagccccggtaaacggcggccgtaactataacggtcctaaggtagcgaaattccttgtcgggtaagttccgacctgcacgaatggcgtaatgatggccaggctgtctccacccgagactcagtgaaattgaactcgctgtgaagatgcagtgtacccgcggcaagacggaaagaccccgtgaacctttactatagcttgacactgaacattgagccttgatgtgtaggataggngggaggtttgaagtgtggacgccagtctgcatggagccgaccttgaaataccaccctttaatntttgatgttctaacgttggcccgtaatccgggttgcggacagtgttggtgggtagtttgctggggcggtctcctcctaaagagaacggaggagcacgaaggttggctaatcctggtcggacataggaggttagtgcaatggcataagccagcttgactgcgagcggacggcgcgagcagggcgaaagcaggtatagtgtccggtggtttgaaggaagggccatcgccaagganaaaaggtactccggggaaacaggctgaaccgcccaagattcatacgcggggtgtttggccctcgtgtcggctcatcactccggggtgaagtaggcccaagggttggctgttcccatttaaagtggcgcggtgggttaacgtgagacagttcggtccctatctgccgtgggcgctggagaactgaggggggctgctcctagtacgagaggaccggagtggacgcatcactggtgttcgggttgtcatgccaatggcactgcccggtagctaaatgcggaagagataagtgctgaaagcatctaagcacgaaacttgccccgagatgagttctccctgactccttgagggtcctgaaggaacgttgaagacgacgacgttgataggccgggtgtgtaagcgcagcgatgcgttgagctaaccggtactaatgaaccgtgaggcttaaccttacaacgccgaagatgttttggcggatgagagaagattttcagcctgatacagattagattaaccggcgacaagcgggttaatgaaacagaatttgcctggcggccttagcgcggtggtcccacctgaccccatgccgaactcagaagtgaaacgccgtagcgccgatggtagtgtggggtctccccatgcgagagtagggaactgccaggcatcaaattaagcgaagagcccagtcggaagactgggcctttttgcgtttctataaactcttcctgtcgtcatatctacaagccatccccccacagatacggtaaactagcctcgtttttgcatcaggaaagcagctatgaaccactccttaaaaccctggaacacatttggcattgatcataatgctcagcacattgtatgtgccgaagacgaacaacaattactcaatgcctggcagcatgcaaccgcagaaggacaacccgttcttattctgggtgaaggaagtaatgtactttttctggaggactatcgcggcacggtgatcatcaaccggatcaaaggtatcgaaattcatgatgaacctgatgcgtggtatttacatgtaggagccggagaaaactggcatcgcctggtaaaatacactttgcaggaaggtatgcctggtctggaaaatctggcattaattcctggttgtatcggctcatcacctatccagaatattggtgcttatggcgtagaattacagcgagtttgcgcttatgttgattgtgttgaactggcgacaggcaagcaagtacgcttaactgccaaagagtgccgttttggctatcgagacagtatttttaaacatgaataccaggatcgcttcgccattgtagccgtaggtctgcgtctgccaaaagagtggcaacctgtactgacgtatggtgacttaactcgcctggatccttcaacggtaacgccacagcaagtatttgatgcggtgtgtcatatgcgcaccaccaaactccctgatccaaaagtgaacggtaatgcgggtagtttcttcaaaaatcctgttgtttctgccgaaactgctaacgcgttgttggcacaatttccaacagccccacattacccccaggtggatggttcagtaaaactggctgcaggttggcttattgatcagtgccagcttaaagggacgcaaattggtggggctgcggtacaccgtcaacaggcgctggttctcataaatgagcacgatgcaaaaagcgaagatgttgtacagctggcgcatcatgtaagacaaaaagtgggtgaaaaatttaatgtctggcttgagcctgaagtccgctttattggtgcatcaggtgaagtgagcgcagtggagacaatttcatgaaggataacaccgtgccactgaaattgatcgccctgttagcgaatggcgaatttcactctggcgagcagttgggtgaaacgctgggaatgagccgggcggctattaataaacacattcagacactgcgtgactggggcgttgatgtatttactgttccgggtaaaggatacagcttgcccgagccaatccagttacttaatgccgaaaagatattgagtcagctggatgacggcagtgtagccgtgctgccagttattgactccacgaatcagtatctcctggaccgcatcggagagcttaaatctggcgatgcctgtgttgcagaataccagcatgctggccgtggtcgtcgtggtcggaaatggttttcgccttttggcgcgaacttatatttgtcgatgttctggcgtctggaacagggcccggcggcggcgattggtttaagtctggttatcggtatcgtgatggcggaagtattacgcaagctgggtgcagataaagttcgtgttaaatggcctaatgacctctatctgcaggatcgcaagctggcaggcattcttgtggagctgactggcaaaaccggcgatgcggcgcaaatagtcattggtgcagggatcaacatggcaatgcgtcgtgttgaagagagtgtcgttaatcaagggtggatcacgctgcaggaagccgggatcaatctcgatcgtaatactcttgcggccatgctgatacgtgaattacgcgcggcgctggaactcttcgagcaagaaggattgacaccttatctttcgcgctgggaaaagttggataattttattaatcgcccagtgaaacttatcattggtgataaagaaatatttggcatttcacgcggaatagacaaacagggtgctttattacttgagcaggatggaataataaaaccctggatgggcggtgaaatatccctgcgtagtgcagaaaaataagaaaggggagcattaactcccctttaaattatttgcgtagtctgacctcttctactgcatgattagcacttttcgtcaggattaaactggcacgctcgcgagtaggtagaatattttgctttaagttcagccagttgatctctttccacaatgtcatggcagtcttaatagcttcttctttagttaatttcgcgtagttatgaaaataggaatccgggtctgtaaaagccccttcgcggaatttcagaaaacggttgatataccacgtctgaagtaagtcttccggtgcatcaacatatatcgaaaaatcgacaaaatcagaaacaaatacatgatgtggatcgtgtggataatccatcccgctctgtaagacatttaacccttcaagaattaaaatatcaggctgaacaacagttttatctccatccgggatcacatcataaataagatgcgagtaaacaggggctgtaacgtttggcacgccggatttgagatcggaaacaaacttcaccaggcgatgcatatcatacgattccgggaagcctttcttcttcatcagaccacgttctttcagaacctgattagggtgaaggaagccatctgtagtgatcagttcaacacgacgatgttccggccaacggcttaatagcgcctgcaatacacgggcggttgtacttttccccaccgcgacactaccagcaatactgataatgtaaggaatgcgttgcccgttggtaccaagaaactgttccagaactgcctgacggcgcagattcgagcttatatagaagttcagcaaacgtgacagaggtaaatagatctcggcaacttcttctaacgagagatcttcattaatacctttgagacgggcgatctcatcttccgataacgtcataggtacggaatcacgcagagctgcccactggttgcggtcaaactgtaggtaaggcgtcattaacgtttgctcttttatactcataagcatgtttctggcggtcatagctctatcggcaaagcgatatttgccatggcgcgtcacagttctgttgaatgggttaatgggcaggagggtaacaccagatggggaggaataataagaaaaaatctctcccaggaagctatcgttgaaaagcaatgtgacagatattccatctgataaaaagaattatggtttagcaggagcacattgttgagcacaatgatgttgaaaaagtgtgctaatctgccctccgttcggctgtttcttcatcgtgtcgcataaaatgtgaccaataaaacaaattatgcaattttttagttgcatgaactcgcatgtctccatagaatgcgcgctacttgatgccgacttagctcagtaggtagagcaactgacttgtaatcagtaggtcaccagttcgattccggtagtcggcaccatcaagtccggtggggttcccgagcggccaaagggagcagactgtaaatctgccgtcacagacttcgaaggttcgaatccttcccccaccaccaatttcggccacgcgatggcgtagcccgagacgataagttcgcttaccggctcgaataaagagagcttctctcgatattcagtgcagaatgaaaatcaggtagccgagttccaggatgcgggcatcgtataatggctattacctcagccttccaagctgatgatgcgggttcgattcccgctgcccgctccaagatgtgctgatatagctcagttggtagagcgcacccttggtaagggtgaggtcggcagttcgaatctgcctatcagcaccacttcttttctcctccctgttttttccttctgtttattgcattcaacaagtcgggcatgttgcctggttgatgtggtgatatcaccgatttatccgtgtcttagagggacaatcgatgtctaaagaaaagtttgaacgtacaaaaccgcacgttaacgtcggtactatcggccacgttgaccatggtaaaacaacgctgaccgctgcaatcactaccgtactggctaaaacctacggcggtgctgctcgcgcattcgaccagatcgataacgcgccggaagaaaaagctcgtggtatcaccatcaacacttctcacgttgaatatgacaccccgacccgtcactacgcacacgtagactgcccggggcacgccgactatgttaaaaacatgatcaccggtgctgctcagatggacggcgcgatcctggtagttgctgcgactgacggcccgatgccgcagactcgtgagcacatcctgctgggtcgtcaggtaggcgttccgtacatcatcgtgttcctgaacaaatgcgacatggttgatgacgaagagctgctggaactggttgaaatggaagttcgtgaacttctgtctcagtacgacttcccgggcgacgacactccgatcgttcgtggttctgctctgaaagcgctggaaggcgacgcagagtgggaagcgaaaatcctggaactggctggcttcctggattcctacattccggaaccagagcgtgcgattgacaagccgttcctgctgccgatcgaagacgtattctccatctccggtcgtggtaccgttgttaccggtcgtgtagaacgcggtatcatcaaagttggtgaagaagttgaaatcgttggtatcaaagagactcagaagtctacctgtactggcgttgaaatgttccgcaaactgctggacgaaggccgtgctggtgagaacgtaggtgttctgctgcgtggtatcaaacgtgaagaaatcgaacgtggtcaggtactggctaagccgggcaccatcaagccgcacaccaagttcgaatctgaagtgtacattctgtccaaagatgaaggcggtcgtcatactccgttcttcaaaggctaccgtccgcagttctacttccgtactactgacgtgactggtaccatcgaactgccggaaggtgtagagatggtaatgccgggcgacaacatcaaaatggttgttaccctgatccacccgatcgcgatggacgacggtctgcgtttcgcaatccgtgaaggcggccgtaccgttggcgcgggcgttgtagcaaaagttctgagctaattgccgataacatttgacgcaatgcgcactaaaagggcatcatttgatgccctttttgcacgctttcgtaccagaacctggctcatcagtgattttctttgtcataatcattgctgagacaggctctgttgagggcgtataatccgaaaagctaatacgcgtttcgatttggtttgcctcgcgatcgcggggtgaaaatgtttgtagaatacttctgacaggttggtttatgagtgcgaataccgaagctcaaggaagcgggcgcggcctggaagcgatgaagtgggtcgttgtggtggcattgctcctggtagcgattgtcggcaactacctttatcgcgacattatgctgccgctgcgtgcgctggccgtagtaattctgattgctgcagcgggtggtgtcgcgctgttaacgacaaaaggtaaagcaaccgttgcttttgcccgtgaagcgcgtaccgaagtccgtaaggtcatttggccgactcgccaggaaacattgcacaccacgctgattgtggctgcggttaccgcagtaatgtcactgatcctgtggggactggatggtattctggttcgcctggtatcctttatcactggcctgaggttctgagatgtctgaagctcctaaaaagcgctggtacgtcgttcaggcgttttccggttttgaaggccgcgtagcaacgtcgctgcgtgagcatatcaaattacacaacatggaagagttgtttggtgaagtcatggtaccaaccgaagaagtggttgaaatccgtggcggtcagcgtcgcaaaagcgaacgtaaattcttccctggctacgtcctcgttcagatggtgatgaacgacgcgagctggcacctggtgcgcagcgtaccgcgtgtgatgggcttcatcggcggtacttccgatcgtcctgcgccaatcagcgataaagaagtcgatgcgattatgaaccgcctgcagcaggttggtgataagccgcgtccgaaaacgttgtttgaaccgggtgaaatggtccgtgttaatgatggtccgttcgctgacttcaacggcgttgttgaagaagttgattacgagaaatctcgtctgaaagtgtctgtttctatcttcggtcgtgcgacccctgtagagctggacttcagccaggttgaaaaagcttaactcagcgatcaaaaaagcggcgatttaatcgttgcacaaggcgcgagattggaatacaatttcgcgccttttgtttttatgggccttgcccgtaaaacgattttttatatcacggggagcctctcagaggcgttattacccaacttgaggaatttataatggctaagaaagtacaagcctatgtcaagctgcaggttgcagctggtatggctaacccgagtccgccagtaggtccggctctgggtcagcagggcgtaaacatcatggaattctgcaaagcgttcaacgcaaaaactgattccatcgaaaaaggtctgccgattccggtagtaatcactgtttacgctgaccgttctttcactttcgttaccaagactccgccggcagcagttctgctgaaaaaagcggctggtatcaagtctggttccggtaagccgaacaaagacaaagtgggtaaaatttcccgcgctcagctgcaggaaatcgcgcagaccaaagctgccgacatgactggtgccgacattgaagcgatgactcgctccatcgaaggtactgcacgttccatgggcctggtagtggaggactaagaaatggctaaactgaccaagcgcatgcgtgttatccgcgagaaagttgatgcaaccaaacagtacgacatcaacgaagctatcgctctgctgaaagaactggcgactgctaaattcgtagaaagcgtggacgtagctgttaacctcggcatcgacgctcgtaaatctgaccagaacgtacgtggtgcaactgtactgccgcacggtactggccgttccgttcgcgtagccgtatttacccagggtgcaaacgctgaagctgctaaagctgcaggtgctgaactggtaggtatggaagatctggctgaccagatcaagaaaggcgaaatgaactttgacgttgttattgcttctccggatgcaatgcgcgttgttggccagctgggccaggttctgggtccgcgcggcctgatgccaaacccgaaagtgggtactgtaacgccgaacgttgctgaagcggttaaaaacgctaaagctggccaggttcgttaccgtaacgacaaaaacggcatcatccacaccaccatcggtaaagtggactttgacgctgacaaactgaaagaaaacctggaagctctgctggttgcgctgaaaaaagcaaaaccgactcaggcgaaaggcgtgtacatcaagaaagttagcatctctaccaccatgggtgcaggtgttgcagttgaccaggctggcctgagcgcttctgtaaactaatgcctttacgtgggcggtgattttgtctacaatcttacccccacgtatgctaacgaaagttagcagctaaaaagatttgttcgttggagcctggcctatccaggcctccgtcgaagaccgcaggagtttcgcaagaaacttaatcccctgcgtagacggtgacagaacgctaagattattcttttatattctggcttgtttctgctcaccgtaattaagacgctctctccgtttggaggagtgaagtgagttccagagattttctctggcaaacatccaggagcaaagctaatggctttaaatcttcaagacaaacaagcgattgttgctgaagtcagcgaagtagccaaaggcgcgctgtctgcagtagttgcggattcccgtggcgtaactgtagataaaatgactgaactgcgtaaagcaggtcgcgaagctggcgtatacatgcgtgttgttcgtaacaccctgctgcgccgtgctgttgaaggtactccgttcgagtgcctgaaagacgcgtttgttggtccgaccctgattgcatactctatggaacacccgggcgctgctgctcgtctgttcaaagagttcgcgaaagcgaatgcaaaatttgaggtcaaagccgctgcctttgaaggtgagctgatcccggcgtctcagatcgaccgcctggcaactctgccgacctacgaagaagcaattgcacgcctgatggcaaccatgaaagaagcttcggctggcaaactggttcgtactctggctgctgtacgcgatgcgaaagaagctgcttaatcgcagttatctttttaacgcattcgcttacgtataaacttattctgatattcaggaacaatttaaatgtctatcactaaagatcaaatcattgaagcagttgcagctatgtctgtaatggacgttgtagaactgatctctgcaatggaagaaaaattcggtgtttccgctgctgctgctgtagctgtagctgctggcccggttgaagctgctgaagaaaaaactgaattcgacgtaattctgaaagctgctggcgctaacaaagttgctgttatcaaagcagtacgtggcgcaactggcctgggtctgaaagaagctaaagacctggttgaatctgcaccggctgctctgaaagaaggcgtgagcaaagacgacgcagaagcactgaaaaaagctctggaagaagctggcgctgaagttgaagttaaataagccaacccttccggttgcagcctgagaaatcaggctgatggctggtgactttttagtcaccagcctttttgcgctgtaaggcgccagtagcgtttcacactgtttgactactgctgtgcctttcaatgcttgtttctatcgacgacttaatatactgcgacaggacgcccgttctgtgtaaatcgcaatgaaatggtttaagcgtgatagcaacaggcattgcggaaagtgttccattttccggtcaacaaaatagtgttgcacaaactgtccgctcaatggacagatgggtcgacttgtcagcgagctgaggaaccctatggtttactcctataccgagaaaaaacgtattcgtaaggattttggtaaacgtccacaagttctggatgtaccttatctcctttctatccagcttgactcgtttcagaaatttatcgagcaagatcctgaagggcagtatggtctggaagctgctttccgttccgtattcccgattcagagctacagcggtaattccgagctgcaatacgtcagctaccgccttggcgaaccggtgtttgacgtccaggaatgtcaaatccgtggcgtgacctattccgcaccgctgcgcgttaaactgcgtctggtgatctatgagcgcgaagcgccggaaggcaccgtaaaagacattaaagaacaagaagtctacatgggcgaaattccgctcatgacggacaacggtacctttgttatcaacggtactgagcgtgttatcgtttcccagctgcaccgtagtccgggggtcttttttgactccgacaaaggtaaaacccactcttcgggtaaggtgctgtataacgcgcgcatcatcccttaccgtggttcctggctggacttcgaattcgatccgaaggacaacctgttcgtacgtatcgaccgtcgccgtaaactacctgcgaccatcattctgcgtgccctgaactacaccacagagcagatcctcgacctgttctttgaaaaagttatctttgaaatccgtgataacaagctgcagatggaactggtgccggaacgcctgcgtggtgaaaccgcatcttttgacatcgaagctaacggtaaagtgtacgtagaaaaaggccgccgcattactgcgcgccatattcgccagctggaaaaagacgacgtcaagctgatcgaagtcccggttgagtacatcgcaggtaaagtggttgctaaagactacattgatgagtctaccggcgagctgatctgcgcagcgaacatggagctgagcctggatctgctggctaagctgagccagtctggtcataagcgtatcgaaacgctgttcaccaacgatctggatcacggcccatatatctctgaaaccttacgtgtcgacccaactaacgaccgtctgagcgcactggtagaaatctaccgtatgatgcgccctggcgagccgccgactcgtgaagctgctgaaagcctgttcgagaacctgttcttctccgaagaccgctatgacttgtctgcggttggtcgtatgaagttcaaccgttctctgctgcgcgaagaaatcgaaggttccggtatcctgagcaaagacgacatcattgatgttatgaaaaagctcatcgatatccgtaacggtaaaggcgaagtcgatgatatcgaccacctcggcaaccgtcgtatccgttctgttggcgaaatggcggaaaaccagttccgcgttggcctggtacgtgtagagcgtgcggtgaaagagcgtctgtctctgggcgatctggataccctgatgcctcaggatatgatcaacgccaagccgatttccgcagcagtgaaagagttcttcggttccagccagctgtctcagtttatggaccagaacaacccgctgtctgagattacgcacaaacgtcgtatctcggcacttggcccaggcggtctgacccgtgaacgtgcaggcttcgaagttcgagacgtacacccgactcactacggtcgcgtatgtccaatcgaaacccctgaaggtccgaacatcggtctgatcaactccctgtccgtgtacgcacagactaacgaatacggcttccttgagactccgtatcgtaaagtgaccgacggtgttgtaactgacgaaattcactatctgtctgctatcgaagaaggcaactacgttatcgcccaggcgaactccaacctggatgaagaaggccacttcgtagaagacctggtaacttgccgtagcaaaggcgaatccagcttgttcagccgcgaccaggttgactacatggacgtatccacccagcaggtggtatccgtcggtgcgtccctgatcccgttcctggaacacgatgacgccaaccgtgcattgatgggtgcgaacatgcaacgtcaggccgttccgactctgcgtgctgataagccgctggttggtacgggtatggaacgtgctgttgccgttgactccggtgtaactgcggttgctaaacgtggtggtgtcgttcagtacgtggatgcttcccgtatcgtaatcaaagttaacgaagacgagatgtatccgggtgaagcaggtatcgacatctacaacctgaccaaatacacccgttctaaccagaacacctgtattaaccagatgccgtgtgtgtctctgggtgaaccggttgaacgtggcgacgtgctggcagacggtccgtccaccgacctcggtgaactggcgcttggtcagaacatgcgcgtagcgttcatgccgtggaatggttacaacttcgaagactccatcctcgtatccgagcgtgttgttcaggaagaccgtttcaccaccatccacattcaggaactggcgtgtgtgtcccgtgacaccaagctggggccagaagagatcaccgctgacatcccgaacgtgggtgaagctgcgctctccaaactggatgaatccggtatcgtttacattggtgcggaagtgaccggtggcgacattctggttggtaaggtaacgccgaaaggcgaaactcagctgaccccagaagaaaaactgctgcgtgcgatcttcggtgagaaagcgtctgacgttaaagactcttctctgcgcgtaccaaacggtgtatccggtacggttatcgacgttcaggtctttactcgcgatggcgtagaaaaagacaaacgtgcgctggaaatcgaagaaatgcagctcaaacaggcgaagaaagacctgtctgaagaactgcagatcctcgaagcgggtctgttcagccgtatccgtgctgtgctggtagccggtggcgttgaagctgagaagctcgacaaactgccgcgcgatcgctggctggagctgggcctgaccgacgaagagaaacaaaatcagctggaacagctggctgagcagtatgacgaactgaaacacgagttcgagaagaaactcgaagcgaaacgccgcaaaatcacccagggcgacgatctggcaccgggcgtgctgaagattgttaaggtatatctggcggttaaacgccgtatccagcctggtgacaagatggcaggccgtcatggtaacaagggtgtaatttctaagatcaacccgatcgaagatatgccttacgatgaaaacggtactccggtagacatcgtactgaacccgctgggcgtaccgtctcgtatgaacattggtcagatcctcgaaacccacctgggtatggctgcgaaaggtatcggcgacaagatcaacgccatgctgaaacagcagcaagaagtcgcgaaactgcgcgaattcatccagcgtgcgtacgatctgggcgctgacgttcgtcagaaagttgacctgagtaccttcagcgatgaagaagttatgcgtctggctgaaaacctgcgcaaaggtatgccaatcgcaacgccggtcttcgacggtgcgaaagaagcagaaattaaagagctgctgaaacttggcgacctgccgacttctggtcagatccgcctgtacgacggtcgcactggtgaacagttcgagcgtccggtaaccgttggttacatgtacatgctgaaactgaaccacctggtcgacgacaagatgcacgcgcgttccaccggttcttatagcctggttactcagcagccgctgggtggtaaggcacagttcggtggtcagcgtttcggggagatggaagtgtgggcgctggaagcatatggcgcagcatacaccctgcaggaaatgctcaccgttaagtctgatgacgtgaacggtcgtactaagatgtataaaaacatcgtggacggcaaccatcagatggagccgggcatgccagaatccttcaacgtattgttgaaagagattcgttcgctgggtatcaacatcgaactggaagacgagtaattctcgctcaaacaggtcactgctgtcggggtaaaacccggcagcggattgtgctaactccgacgggagcaaatccgtgaaagatttattaaagtttctgaaagcgcagactaaaaccgaagagtttgatgcgatcaaaattgctctggcttcgccagacatgatccgttcatggtctttcggtgaagttaaaaagccggaaaccatcaactaccgtacgttcaaaccagaacgtgacggccttttctgcgcccgtatctttgggccggtaaaagattacgagtgcctgtgcggtaagtacaagcgcctgaaacaccgtggcgtcatctgtgagaagtgcggcgttgaagtgacccagactaaagtacgccgtgagcgtatgggccacatcgaactggcttccccgactgcgcacatctggttcctgaaatcgctgccgtcccgtatcggcctgctgctcgatatgccgctgcgcgatatcgaacgtgtactgtacttcgaatcctatgtggttatcgaaggtggtatgaccaacctggagcgtcagcagatcctgactgaagagcagtatctggacgcgctggaagagttcggtgacgaattcgacgcgaagatgggtgcggaagcaatccaggccctgctgaagagcatggatctggagcaagagtgcgaacagctgcgtgaagagctgaacgaaaccaactccgaaaccaagcgtaaaaagctgaccaagcgtatcaaactgctggaagcgttcgttcagtctggtaacaaaccagagtggatgatcctgaccgttctgccggtactgccgccagatctgcgtccgctggttccgctggatggtggtcgtttcgcgacttctgacctgaacgatctgtatcgtcgcgtcattaaccgtaacaaccgtctgaaacgactgctggacctggctgcgccggatatcatcgtacgtaacgaaaaacgtatgctgcaggaagcggtagacgccctgctggataacggtcgtcgcggtcgtgcaatcaccggttctaacaagcgtcctctgaaatctttggccgacatgatcaaaggtaaacagggtcgtttccgtcagaacctgctcggtaagcgtgttgactactccggtcgttctgtaatcaccgtaggtccatacctgcgtctgcatcagtgcggtctgccgaagaaaatggcgctggagctgttcaaaccgttcatctacggcaagctggaactgcgtggtcttgctaccaccatcaaagctgcgaagaaaatggttgagcgcgaagaagctgtcgtttgggatatcctggacgaagttatccgcgaacacccggtactgctgaaccgtgcaccgactctgcaccgtctgggtatccaggcatttgaaccggtactgatcgaaggtaaagctatccagctgcacccgctggtttgtgcggcatataacgccgacttcgatggtgaccagatggccgttcacgtaccgctgacgctggaagcccagctcgaagcgcgtgcgctgatgatgtctaccaacaacatcctgtccccggcgaacggcgaaccaatcatcgttccgtctcaggacgttgtactgggtctgtactacatgacccgcgactgtgttaacgccaaaggcgaaggcatggtgctgactggcccgaaagaagcagaacgtctgtatcgctctggtctggcttctctgcatgcgcgcgttaaagtgcgtatcaccgagtatgaaaaagatgctaacggtgaattagtggcgaaaaccagcctgaaagacacgactgttggccgtgccattctgtggatgattgtaccgaaaggtctgccttacaccatcgtcaaccaggcgctgggtaaaaaagcaatctccaaaatgctgaacacctgctaccgcattctcggtctgaaaccgaccgttatttttgcggaccagatcatgtataccggctttgcatatgcagcgcgttctggtgcatctgttggtatcgatgacatggtcatcccggagaagaaacacgaaatcatctccgaggcagaagcagaagttgctgaaattcaggagcagttccagtctggtctggtaactgcgggcgaacgctacaacaaagttatcgatatctgggctgcggcgaacgatcgtgtatccaaagcgatgatggataacctgcaaactgaaaccgttattaaccgtgacggtcaggaagagaagcaggtttccttcaacagcatctacatgatggccgactccggtgcgcgtggttctgcggcacagattcgtcagcttgctggtatgcgtggtctgatggcgaagccggatggctccatcatcgaaacaccaatcaccgcgaacttccgtgaaggtctgaacgtactccagtacttcatctccacccacggtgctcgtaaaggtctggcggataccgcactgaaaactgcgaactccggttacctgactcgtcgtctggttgacgtggcgcaggacctggtggttaccgaagacgattgtggtacccatgaaggtatcatgatgactccggttatcgagggtggtgacgttaaagagccgctgcgcgatcgcgtattgggtcgtgtaactgctgaagacgttctgaagccgggtactgctgatatcctcgttccgcgcaacacgctgctgcacgaacagtggtgtgacctgctggaagagaactctgtcgacgcggttaaagtacgttctgttgtatcttgtgacaccgactttggtgtatgtgcgcactgctacggtcgtgacctggcgcgtggccacatcatcaacaaaggtgaagcaatcggtgttatcgcggcacagtccatcggtgaaccgggtacacagctgaccatgcgtacgttccacatcggtggtgcggcatctcgtgcggctgctgaatccagcatccaggtgaaaaacaaaggtagcatcaagctcagcaacgtgaagtcggttgtgaactccagcggtaaactggttatcacttcccgtaacaccgaactgaaactgatcgacgaattcggtcgtaccaaagaaagctacaaagtaccttacggtgcggtactggcgaaaggcgatggcgaacaggttgctggcggcgaaaccgttgcaaactgggacccgcacaccatgccggttatcaccgaagtaagcggttttgtacgctttactgacatgatcgacggccagaccattactcgtcagaccgacgaattgacaggtctgtcttcgctggtggttctggattctgcagaacgtaccgcaggtggtaaagatctgcgtccggcactgaaaatcgttgatgctcagggtaacgacgttctgatcccgggtaccgatatgcctgcgcagtacttcctgccgggtaaagcgattgttcagctggaagatggcgtacagatcagctctggtgacaccctggcgcgtattccgcaggaatccggcggtaccaaggacatcaccggtggtctgccgcgcgttgcggacctgttcgaagcacgtcgtccgaaagagccggcaatcctggctgaaatcagcggtatcgtttccttcggtaaagaaaccaaaggtaaacgtcgtctggttatcaccccggtagacggtagcgatccgtacgaagagatgattccgaaatggcgtcagctcaacgtgttcgaaggtgaacgtgtagaacgtggtgacgtaatttccgacggtccggaagcgccgcacgacattctgcgtctgcgtggtgttcatgctgtgactcgttacatcgttaacgaagtacaggacgtataccgtctgcagggcgttaagattaacgataaacacatcgaagttatcgttcgtcagatgctgcgtaaagctaccatcgttaacgcgggcagctccgacttcctggaaggtgaacaggttgaatactctcgcgtcaagatcgcaaaccgcgaactggaagcgaacggcaaagtgggtgcaacttactcccgcgatctgctgggtatcaccaaagcgtctctggcaaccgagtccttcatctccgcggcatcgttccaggagaccactcgcgtgctgaccgaagcagccgttgcgggcaaacgcgacgaactgcgcggcctgaaagagaacgttatcgtgggtcgtctgatcccggcaggtaccggttatgcgtaccaccaggatcgtatgcgtcgccgtgctgcgggtgaagctccggctgcaccgcaggtgactgcagaagacgcatctgccagcctggcagaactgctgaacgcaggtctgggcggttctgataacgagtaatcgttaatccgcaaataacgtaaaaacccgcttcggcgggtttttttatgggtgttattcagagggcaaagtcttcacgggaaatattaagaaaggcagggcgaaacgaggaagaagcttttcgccctggacaacattcctgttgacgggactaccataaaaaaacacaacgctttcaacaaccttgcgtttttcatcttccggagctgctcggaataaatttacgttcttacattctgtctcatggcctttgcgatgggcgtcccagatagctgtcccagtctttccataccggctgcaaaccctgagcggttaacgcggcagcaaccgcttccggtctgcgatcgtcgtgcggtgagaactgttccagctcggggtggttgtcggcatagccacctggctgcgttttcgaaaaagcgctgacgttattaattgccagcggaattacgcgatcgcgaaaccacggtgattcccgcgtggagagtgacagttcaatctccggtgcaagcagccggaaagcgcagatggcttgcactaactggcgttcatccataatcgacgcaggctcaatgctgccagtacatggacgcaggcgtgggaaggagacagagtagcggctttgccagtaatgctgttgcagccatagcaaatgttcggcaaccgtatagcagtcaactcgccagttgtcggaaaggccgattagcgcgccgaggcctatcttatcaatccccgcacgccctagccgatccggcgtttccagccgccagaagaagtcctgttttttacctttcagatgatggcgggcataagtcgcctcgtgatatgtctcctgataaaccatcacgccatccagacctagttgctttaactcggcgtattccgtctccgccagcggttgcacttccatctgtagtgaagagaactgttcacgcagggcagggagatgacgacgaaagtaatccatccccactttcgcctgatgttcaccagtgactaatagcagatgttcaaagcccatctcccgtatagcggcgctttccctggcaatatccgcttcatccagcgttttgcgcttgatgcgattgctcatggaaaatccgcagtacgtgcagtcgttagcgcaaagattggaaagataaagcgggacgtagaagctgacgacgttgccaaatcgctgacgggtcagacgctgcgcccgttgagccagtggttccaggtattcactggcggcaggtgatagcaatgccatcatatcgtcgcgggtgagttgcgaggcatttagcgcccgctctacgtcagcagccgttttgctgttgatacgcaggcgaatgtcgtcccagtccagttgtcgccagcgatcgctgaaggttttcatgccgatgcctccagaaattcggtcagcgggctggtggcatgagcaaaatgactgcggctgcccggtccggcctgacgtgccagcaggcctgcttctaccgccaggcgaaatgccttcgccatgttgacgggatcgtccgcgacggcaatcgccgtattcactaacaccgcattggcccccatttccagtgcctgcgcggcatggctgggaacaccgatgccagcatcgacaaccaccggaacagtggcctgttggataataatctccagcatggcgcgggtttccagtccctgattcgagccaatcggcgcgccgagcggcatcaccgctgcacagccgacttcttccagacgtttacacaataccggatcggccccgcagtaaggcagcacgacaaatccctgttgtaccagcgtttcggcggctttcagggtttcgatgggatcgggcaacagccagcgggcgtcagggtgaatctctaattttagccagtttgtgcctaacgcttcacgtgccagatgggcggcgaaaatggcttcttccgcggttttcgccccggaagtattcggcagcagggtcacacccgccgcgataagcggttcgaggatagcgtcgttgtgctggcgcaagtcgacacgtttcatcgccagcgtcaccagttggctgccggaagcgcgaatagactccaccatcagttgtgaagaggcgaattttccggtgccggtaaacagatgtgaatcaaacgttttgtccgcaatatgtaacatctcaaccccctgcaataacctgaaaaagcaggatctggtcgccatcctgcacgatatgttgcgcccattgttcccgcgggacgatttgctgattaatcgccagtgccgcacctgcttgttgttgatcgagttgctccagcagttcgtgaacagttagtccggcgacacactgcatcggttgatcgttaaacaggatctgcattgcttcctccgcataccgggcaaccactggcgcggcgcaaagccaggctgcgccactggctcgacttaccgtcgaacagtcggagttctcccgcaggcgtctctataccgcttaataacttaatggcttccagggcctgtaaagtgcccataaccccgaccaccgggccaaccacgcccgccgtgcggcagttgcgttctggctcctggttatctggccacaggcagcggtaacacccctgctcccagggcggcgtcagtaccatcaactgaccgccaaatccgaccgcgctggcggtgataagcggcgtgttgagtgccacgcaggtggcattaatctcctggcgagtcgccatattgtcagtacagtcgagcaccacatcggcttgtgcaaccgcatcttttaacgtctcacccgttaatcgttgttgtaatgccatcagttgaatgtcgggattcaactgtgtcagtcgctgttggctgacctgtgatttcgggagatcgatatcttcagtggtaaagaggatttgtcgttgcagattgcttaaatgcacatcgtcgtcatctgccagtaccagcgtcccgacgccagcccccgccaggtatagcgcagcaggtgtacccagaccgccaagaccaataatcagcacctggctgtcgagcagtttttgctgcccgtccagagcgatatcgtcgagcaggatttggcggctataacgcataaagtcacggtcattcatcgccaactcctgcaatttccagcagctgtgccgttgccaaacgccagtctgcggcttgagtaatggcgctgacgacggcgatactgccgacacccgttgctatcaccgcaggcgcgcgcgccagactgataccgccaatcgccacggtgggataatccgccaggcgctcaacatgccgtgccagctgttccagcccctggggtgcggaaggcatctgtttggtttgcgtcgggaacacatgtcccagcgcgatataagaagggcgtgctgccagcgcgacgtcgatttccatatcatcatgtgtcgaaacgcccagtcgcagacctgccgcgcggatggtgctgagatcggtggcttgcaaatcttcctgccccagatggacgccgtatgcctgatgcttgatcgccagtcgccagtaatcattaataaacaatcgcgcgttatagcggcggcccagcgcaattgccgccacgacatcggcttccacctcttcatcgcgctgatctttgatgcgtagctggagagtacgtacgcctgcatccaacagacgttcgatccactgtacgctgtcaaccaccgggtacagtcctaaacgaaagggtacaggaggaaactcaggctgatacatcacgcttcctccttacgcaggtagatttctccgcctctggcgcggaagttctccgacatatccgccattcccacttcaatggtttgcgcggcggcgtaatcacgcacttcctggctgattttcatcgagcagaatttcggtccacacatggagcaaaaatgggcgactttaccggactcttgcggcagggtttcatcgtgataagcgcgggcagtaaacgggtcgagggccagattaaactggtcttcccagcgaaattcgaagcgggctttcgacatggcgttatcgcgaatttgcgcgcccggatgccctttcgccaggtcggcggcgtgagcggcaatcttataggtgataagcccctgtttaacatcttctttatttggcaggcccagatgctctttcggcgttacgtagcagagcattgcacaaccaaaccagccaatcatcgccgcgccaatccctgacgtgaagtggtcatagcccggcgcgatatcggtagttagcggccccagagtgtaaaatggcgcttcgtggcagtgctctaactcctcggtcatattgcggcgaatcatctgcatcggcacgtggcctgggccttcaatcatcacctgtacgtcatattcccaggcgattttagtcagttcacccagcgtatgcagctcggcaaactgtgcttcatcgttggcgtcctgaatagaaccggggcgcaggccgtcgcccagcgatagcgaaacgtcataagcagcacagatttcacaaatttcgcggaagtgttgatagaggaaattttcctgatgatgggagaggcaccatttcgccataatcgaaccgccgcgagagacgataccggtcaggcgtttcgcggtcatcggcacgtagcgcagcagcacccccgcatggatcgtgaagtaatccacaccttgctcggcttgttccagcagggtgtcgcggaagacttcccaggtaagatcttcagcgatcccgttcaccttctccagtgcctggtagatcggcactgtaccgatcggcaccgggctgttacgcaaaatccactcgcgggtttcgtgaatatagcgaccagtggaaagatccatcacggtatccgctccccagcgtgtggaccataccagtttttccacttcttcttcgatggaagaagtgaccgctgagttgccgatattggcgttaacttttaccaggaagttacggccaataatcatcggctccgattccggatgattaatgttggccgggataatcgcacgtccggcagcaacttcatcacggacaaattccgcagtgatattttccggcagacgtgcgccaaagctcattcccggatgctggtggcgtaaaacttcgctccgtatgcgctcgcgacccatattctcgcgaatggcgatgaattccatttcgggtgtgatgataccctggcgggcgtagtgcagttgggtgacgcggcgtcctgctttggcgcgttttggcgttaatacgccgctaaaacgcagctcgtcgaggccatcatctgccagccgcgcttttgtgtaatcggaactgcgcacggtaagttcttcggtatcgccgcgcgcatcgatccacggctggcgtagttttgccagcccttgctgcacgttaatggcgatctgcggatcgccatacggaccggaggtgtcgtagaccggaatcgcttcgttttcttcgtactgcggttgttctttgctaccgccgattagcgtcgggctaagctggatctcacgcatcggcacgcgcacgccgggttgtgtggcagtgatgtaaatgcgttttgagttgggaaaggcggagccttccagggtatcgataaaatgttgggcctgggcgcgttgttcgcggcgggtcagttttgttgcagacatagctcgttccaaaaagttaaggacgtggcttgtcagacgacggatgaagcaagagacgatcgccgcaaaggcgatgcgatagcagattaactcttgttcccttcgcaggtattagcctgatcaggttccgcggatcccgaataaacggtctcagccagttaaggcactccgacaagaaattagccccacaaacggggcgttgaatgtaaattacgcgttaacagcgcagaactcaagcaggatgtttgacgcgggcggcgtcaagcaccagtagaatcagcttatcttccagcacaaagcgcgcttccagtgcctcgccgatgtcagataaaacctgttgaaactcaaggtaattatcatgatcgatggcggtttccagactggaatcgtagtcatccataatctgttgagtattggcttcgagttgtggccaaatcttcgcggcgcgtgcgagttgcccattgccttccagcttatgaagaatgcgctcataaatactgaaatgtccggcagacaagtaatcgaccaggctctgacaaaaatcatcaagggctttttcgtttagcctcatgtacgattctttgccaggcttaatgccaaccagattgtagtaagccacgagcagatgcttacgtacatgtagccagcgatcaaccagtttgttacttcctctgacgcgctccgtcaggttatcgagctggttaagcatgattgactccgcaagtttgtattcaaaaactgctctgtgagaaatgtaaaaaccatgttaaacatgccagtgatgcaaaggtagtgcaagagctatggatcgtataattgaaaaattagatcacggctggtgggtcgtcagccatgaacaaaaattatggttgccgaagggagaattgccatatggcgaagcggcaaatttcgatcttgtgggtcagcgcgcactacaaatcggcgaatggcagggggaacctgtttggttagtacaactgcagcggcgtcacgatatggggtcggtacgtcaggtcattgatctcgatgttgggctgtttcaactggccggacgtggcgtgcaactggcggagttttaccgatcgcataaatactgtggttactgcgggcatgaaatgtatccaagcaaaaccgaatgggcgatgctgtgcagccattgccgtgagcgttactacccgcaaatcgccccctgcattattgttgccatccgtcgcgatgattcgatcctcctcgcccagcatacccgccatcgtaacggtgtccatacagtacttgccggattcgtcgaagtgggtgaaaccctcgagcaggcagtcgcgcgggaagtgatggaagagagcggaattaaagttaaaaacttgcgttacgtgacctcccaaccgtggccgtttcctcagtctttaatgaccgcgtttatggcggaatatgacagcggcgagatcgtgatcgacccgaaagaattgcttgaggcgaactggtatcgctatgacgatttgccgttactcccgccgcccggcaccgtagcgcgccgtctgatagaagatacagtggcgatgtgtcgggcagagtatgagtgatgatacactgaccgcctgacgcactaaggaacagccaaaatgaccgaacttaaaaacgatcgttatctgcgggcgctgctgcgccagcccgttgatgtcactccagtatggatgatgcgccaggcgggtcgctatctaccggaatataaagccacgcgcgcccaggcgggcgattttatgtcgctgtgcaaaaatgccgagctggcgtgcgaagtgactttgcaaccgctgcgtcgctatccgctggatgcggcgatcctcttttccgatatcctcaccgtgccagacgcgatgggtttagggctctattttgaagccggagaaggtccgcgttttacctcgccagtcacctgcaaagccgatgtcgataaactgccaattccggacccggaagatgagctgggttacgtgatgaacgcggtgcgtaccattcgtcgcgaactgaaaggcgaagtgccgctgattggtttttccggcagcccgtggacgctggcgacctacatggtggaaggcggcagcagcaaagcgttcaccgtgatcaaaaaaatgatgtatgccgatccacaggcgctgcacgcgctactcgataaactggcgaaaagcgtcactttgtatctgaatgcgcagattaaagccggtgctcaggcagtcatgattttcgacacctggggcggcgtgcttaccgggcgcgattatcaacagttctcgctctattacatgcataaaattgttgatggtttactgcgtgaaaacgacggtcgccgcgtaccagtcacgctgtttactaaaggcggtggacagtggctggaagcgatggcagaaaccggttgcgatgcgctgggcctcgactggacaacggacatcgccgatgcgcgccgtcgcgtgggcaataaagtcgcgctgcagggtaatatggacccgtcgatgctgtacgcgccgcctgcccgcattgaagaagaagtggcgtctatacttgccggtttcggtcacggcgaaggccatgtctttaaccttggtcacggcattcatcaggatgtgccgccagaacatgcaggcgtgtttgtggaggcagtgcatcgcttgtctgaacagtatcaccgctaaggagcgattatggatctcgcgtcattacgcgctcaacaaattgaactggcttcttctgtgatccgcgaggatcgactcgataaagatccgccggatctgatcgccggagccgatgtcggatttgagcagggcggagaagtgacgcgagcggcgatggtgctgctgaaatacccctcgcttgagctggtggagtataaagtggcccgcatcgccaccaccatgccttacattccaggttttctctcgttccgcgaatatcctgcgctgctggcagcgtgggagatgctgtcgcaaaagccggatttagtgtttgtcgatggtcatgggatctcgcatcctcgccgtcttggcgtagccagccattttggcttattggtggatgtgccgaccattggcgtagcgaaaaaacggctctgcggtaaattcgaaccgctctccagcgaaccgggcgcgctggccccgctgatggataaaggcgagcagctggcctgggtctggcgcagcaaagcgcgctgtaacccgttgtttatcgctaccggccatcgggtcagcgtggacagcgcgctggcgtgggtacaacgctgcatgaaaggctatcgtctgccggagccaacgcgctgggcggacgcggtggcctcggaacgtccggcgttcgtgcgctatacagcaaatcagccctaattcaggtaaactgcggataatttccgtatttgagaactcaacatgttacaaaacccaattcatctgcgtctggagcgcctggaaagctggcagcatgtcacttttatggcctgcttatgcgaacgcatgtaccccaattacgccgtattctgtcagcaaaccggcttcggcgatgggcagatttaccgccgcattctcgatctcatttgggaaacgctgaccgtcaaagacgcaaaagtaaatttcgacagccaactggagaaatttgaagaagcgattccttcagccgacgatttcgatctgtacggcgtttatccggcaattgatgcttgcgtggcgttaagtgaactggtccattcgcgtttaagtggcgaaacgctcgaacacgcggtggaagtgagtaagacctccatcacgaccgtggcgatgctggaaatgactcaggctggtcgcgaaatgagcgatgaagagctcaaagaaaacccagctgtagagcaagaatgggacattcagtgggaaatattccgacttttagctgagtgcgaagaacgcgatatcgagctgataaaaggccttagggcagacctgcgtgaggcgggtgagagcaatattggtataatttttcagcaataagaccagaaaacgtgatttaacgcctgatttgtcgtacctggagtcttccctttcgccccccgtctggtctacatttggggggcgaaaaaaagtggctatcggtgcgtgtatgcaggagagtgctattctggcatttccgtcgcactcgatgcttagcaagcgataaacacattgtaaggataacttatgaacaagactcaactgattgatgtaattgcagagaaagcagaactgtccaaaacccaggctaaagctgctctggagtccactctggctgcaattactgagtctctgaaagaaggcgatgctgtacaactggttggtttcggtaccttcaaagtgaaccaccgcgctgagcgtactggccgcaacccgcagaccggtaaagaaatcaaaattgccgcagctaacgtaccggcatttgtttctggcaaggcactgaaagacgcagttaagtaagattgcgtggcagtgaacagttttatcgaaggggtggtttcaccccttttgtctttctggcgtcgatcattgatgctggctggcgctctgtttctcactgcttgtagtcacaactcttcacttcctccctttaccgccagtggatttgctgaagaccagggcgcggtacgcatctggcgaaaagacagcggcgataatgtgcatctgcttgccgtgtttagcccgtggcgcagtggcgataccacgacgcgagagtatcgctggcagggcgataacctcacgctcatcaatatcaatgtttacagcaaacccccggtgaatattcgcgcgcgttttgacgatcgcggcgatctgagctttatgcaacgcgaatccgatggggaaaagcagcagctttctaacgaccaaatcgatttataccgttatcgtgctgatcagatccgccagattagcgatgccttacgtcaggggagagtcgtgctgcgccaggggcgctggcatgcgatggagcagactgtgaccacctgtgaagggcaaaccattaaacctgatttagattcgcaggcgatagcgcatatcgagcgccgccagagccgctcttctgttgatgtcagcgtggcatggctggaagcgcccgaaggttcgcaattactgttggtggcaaactctgatttctgtcgctggcaacccaacgagaaaacgttctgatttaccagtggcccatacccatatgaccgccaccaccgcagccgccgtaacccattccggtaccgcgcggaatacccgcttcagccatcgcaatatctcgtttcacccgtaactcatctaacgactgacgcaaattctccatctctttggcgaccgcgttaattttgctgctatccggtgggttcgcggctaacagggcattgtattcataacgctttgtcaccagttgctgttgcagtgcgctgctttgagcgtaaaagtcattatggattttctgccacgctgtctgttgttcgctggtcaaaggcgcggcattttgctgccacataccatgtccgccgtgagcaaatgcagatgtcgatcccatcgccattgctgaaagcgccatcattaccagggcaattttcgtgttccgtttcatggttaatcctccagtggttgtcttacttcgggtattgcatcttccgtgccaacggcgaaacgctgatatgacgggtaatctggcatgataaacgagtaaaaatgactcgcctgctgcgggtagcgagtcatttttactcattgaaacttaagcctttgtgttacagctcagggtaagcgctgataaaagatggcatgatttctgctgtcagaaagggatggacaggcaaagaagaagatgcgttttatgcaacgttctaaagactccttagctaaatggttaagcgcgatcctccccgtggtcattgttgggctggtggggctgtttgcggtgacagtgattcgcgattatgggcgcgagactgccgccgccagacaaacgctgctggaaaaaggcagtgtacttatccgtgctctcgaatccggctcgcgcgtcggcatggggatgcgcatgcatcatgcgcagcagcaggcattactggaagaaatggccgggcagcctggtgtacgttggtttgcggtcacggatgaacaaggaacaatcgtgatgcatagcaactccggcatgatgggaaaacagctttattccccgcaggaaatgcagcagttacatccgggagatgaagaagcgtggcggcggatcgatagcgcagacggcgagcctgttctggaaatttatcgccagtttcaaccgatgtttgctgctggaatgcaccggatgcgccatatgcagcagtatgccgcgacaccacaagcaatttttatcgctttcgacgccagtaacattgtgagtgctgaagatcgtgagcagagaaacaccctgattatcctcttcgccctggcgacggtcttgctggcaagcgtgttgtcattcttctggtatcgccgatatctgcgctcgggccagctgttgcaggatgaaatgaagcgcaaagagaagctggtggcactggggcatcttgcggcaggcgttgcccacgaaatccgtaacccactttcctcgattaaagggctggcgaaatactttgccgaacgcgcgccagcagggggagaagcgcatcaactggcgcaggtgatggcgaaagaagctgaccgtttaaaccgcgtggtaagcgagttgctggaactggttaagccaacgcatctggctttgcaggcggtggaactcaacacgctgattagccactcattacagctggtaagccaggatgcaaacagccgggagatccagttacgctttaccgccaacgacacattaccggaaattcaggccgatccggacaggctgactcaggtcctgttgaatctctatctcaatgctattcaggcgattggtcagcatggcgtgattagcgtgacggccagcgaaagcggcgcaggcgtgaaaatcagcgttaccgacagcggtaagggaattgcggcggatcagcttgaagccatcttcaccccgtacttcaccaccaaagccgaaggcaccggactggggctggcggtcgtgcataatattgttgaacaacacggtggtacaattcaggtcgcaagccaggagggaaaaggcgcaacgttcaccctttggcttccggtcaatattacgcgtaaggacccacaaggatgacgcacgataatatcgatattctggtggtggatgatgacattagccactgcactattttgcaggctttgctgcgcggctggggttataacgtcgcgctggcgaacagcgggcgacaggcgctggagcaggtgcgggaacaggtttttgatcttgtgctttgcgatgtacgaatggcagagatggatggtatcgccacgctaaaagagatcaaaacattaaaccccgcgattccggtgctgattatgaccgcgtactccagcgtcgagacggcggtagaggcgttgaaaaccggggcgctggattatctcatcaagccgctggatttcgataacctgcaggcgacgctggaaaaggcgctcgcgcatacacacagtgttgacgctgaaacgcctgcggtgtctgccagccagttcggtatggtcggtaaaagcccggcgatgcaacacctgctcagtgaaatcgccctcgtcgcgccatcggaagccacggtgctgatccacggcgattccggcaccggtaaagagctggtcgccagggcgattcacgccagtagcgcacgtagcgaaaaaccgctggtaacgctcaactgcgcggcgctcaacgaatccttgctggagtctgaattgttcggtcacgaaaaaggggcgtttaccggggccgacaaacgccgggaagggcgctttgttgaggcggacggcggcacgctgtttctcgatgaaattggcgatatctcgccgatgatgcaggttcgtctgctgcgtgcgattcaggagcgcgaagttcagcgtgtcggcagcaaccagaccatctcggttgatgtccggctgattgcggcgactcatcgcgatcttgccgcagaggtgaatgccgggcgttttcgccaggatctctactatcgcctgaacgtggtggcgattgaagtaccatcgctgcgtcagcggcgggaagatattcctctgctggcaaaccattttcttcagcgctttgccgaacgtaatcgcaaggcggtaaaaggctttacgccccaggcgatggatctgctgattcattacgactggccgggaaatattcgtgaactggaaaacgcggtggaacgggcggtggtgctgctgaccggggaatatatttccgaacgcgagctgccgctggcgattgccagtacgccgatcccgctggtacaaagtcaggatattcagccgctggtggaagtcgaaaaagaggtgattctggcggcgctggagaaaacgggcggcaacaaaaccgaagccgcccgccagttagggatcacgcgcaaaacgctattggcaaaactgtcgcgttagttctgctcgcgttcgatagcgcgccagccgatatctttccggcagaagcagtcgtcccaatggatatcggtcattaaggcataagcgcgtttctgcgcttctgccacggtatgacccagcgcggtaacgcacagtacgcgcccgccgctggtcactacctgctcgtcatccgctagtttcgtgcccgcgtggaacactttgccgtctgccacttcttccagcggcaggccgtggatcacatcgccggtgcggtaatcgcccggatatccacccgcagccatcaccacgccgagagaagcgcgttcatcccactcggacgttttctcgtccagcttgccttcacaggccgccaggcagagctcaaccagatcggacttcatgcgcagcataatcggctgggtttccggatcgccaaagcggcagttaaattcaataaccttcggattgccctgtttgtcgatcatcaggcccgcgtagagaaaaccagtgtaggtgttgccttccgccgccatgcctttcacggttggccagatgatacgttccatcgtgcgctgatgaacctcatcggtcactactggcgcaggggagtaagcgcccatcccgccggtgttcggcccggtatctttatcgcctacgcgtttgtgatcctggctggtggccatcggcagcacatgctcgccgtccaccatcacgataaagctcgcttcttcgccgtcgaggaactcttcgataacaatgcgatgacccgcgtcgccaaacgcgttgcccgccagcatgtcgcgcacggcggcttcagcttcttccagcgtcatcgccacgataacgcctttcccggcggccagaccgtccgctttaatgacgattggcgcgcctttctcacgcagatacgccagcgcaggttctacctcggtgaagttctggtattccgctgtgggaatgttatggcgggccagaaagtctttggtgaatgctttagaaccttccagttgtgcagcacctgcggttgggccgaagattttcagcccggcggcgcggaaggtatcgactacgcctttcaccagcggcgcttccgggccaacgatggttagatctaccttttcgttttgtgcgaaatccagcagcgccgggatatcggttacgccgatagcgacgttctgtagcgcgggttccagcgcagtgcctgcattacccggagcaacaaaaacagtttcaaccagcggcgactgagccgctttccaggccagcgcgtgctcgcgcccgccgttaccaatcactaatactttcatctattgctccattaatggcggaagtggcgcatgtcggtgaagagcatcgcaataccgtgctcgtcggcggcggcaatcacttcgtcatcacggatagaaccgccaggctggattacacaggtcacacccgcagcggcggcggcatcaataccgtcgcggaacgggaagaacgcgtcagaagccattgacgaacctttcacttccagaccttcatcggcagctttaataccggcgatttttgcggagtacacgcggctcatctggcccgcgccaatgccgatggtcatattgtttttggcatagacaatggcgttggatttcacgaatttcgccaccttccagcagaacagcgcatcacgcagctcctgttcgctcggctggcgtttggtgacgacgcgcagttcttccgcaccgaccatgcccaggtcgcgatcctgaaccaggaggccgccgttcacgcgtttgaaatcaaggcccggaacacgctcgccccactgaccgcaggtcagaacgcgtacgttctgtttggcggcggtgattttcagagcttcttcgctggcggacggcgcaataatcacttcgacaaactgacgagaaatgatggcctgtgcggtttccgcatccagctcgcggttaaaggcgataatgccgccgaacgcggaggttgggtcggttttgtacgcgcgatcgtaagcatcaagaatggaatggccgatagcaacgccgcaagggttggcgtgcttcacaatcacacatgccggctcggcgaactctttcacgcactccagcgccgcatcggtatcggcgatgttgttataagagagggctttaccctgaacctgggttgcggtagcaacggaggcttctttcacattctcttctatatagaaggcagcctgctggtggctgttctcgccgtaacgcatatcctgcttcttaatgaagttcaggttcagcgtgcgtgggaagcgaccggcggcttctttgctttcaccgtggtaagccggaaccatgctgccgaagtagttggcaatcatgctgtcgtaggcggcggtatgttcaaaggctttgatggcaaggtcgaaacgggttgcaagcgtcagcgatccttcgttggcatccatctctttaataatggcgtcgtagtcgctgctcttcaccacgattgcgacatctttatggttcttggcggcggagcgcaccatcgttgggccgccgatatcgatgttctctaccgcatcttccagcgagcagccttcacgagcaacggtctgggcgaacggatacaggttaacaaccaccatatcgataggcaggatctgatgttcttccataatggcatcgtccaggccgcgacggcccagaatgccaccatgtactttcggatgcagggtcttcacgcgtccatccatcatctccgggaaaccggtgtaatcggaaacttcggttaccggcagacctttttctgctaacagacgggctgtgccccctgtagacagcagctccacaccgcgtgcggaaagtgcctgggcgaattcgacgataccggctttgtcagaaacactgagcagagcgcggcggactggacgacgttgttgcatggtaaatcccctggatttgactattacagagagcgttagctgaatttttcgcgaaaaactcagctaacgcccctaacggggcatccttatttttcgcccgcattgtaacgaaaacgtttgcgcaacgctcgcgaatttttctctttcaatggtgatcacaattttgacagtggctaccgtgggaaaaatacagaaattacattgatgattgtggataactctgtgcgtaaaaaggtataaagcggggttttgctggggaatgcagcagtcagtcatttttatgcaatttttctattgcggcctgcggagaactccctataatgcgcctccatcgacacggcggatgtgaatcacttcacacaaacagccggttcggttgaagagaaaaatcctgaaattcagggttgactctgaaagaggaaagcgtaatatacgccacctcgcgacagtgagctgaaagccgcgtcgcaactgctctttaacaatttatcagacaatctgtgtgggcactcgaagatacggattcttgacgtcgcaagacgaaaaatgaataccaagtctcaggagtgaacacgtaattcattacgaagtttaattctttgagcatcaaacttttaaattgaagagtttgatcatggctcagattgaacgctggcggcaggcctaacacatgcaagtcgaacggtaacaggaatcagcttgctgatttgctgacgagtggcggacgggtgagtaatgtctgggaaactgcctgatggagggggataactactggaaacggtagctaataccgcataacgtcgcaagaccaaagagggggaccttcgggcctcttgccatcggatgtgcccagatgggattagctagtaggtggggtaaaggctcacctaggcgacgatccctagctggtctgagaggatgaccagccacactggaactgagacacggtccagactcctacgggaggcagcagtggggaatattgcacaatgggcgcaagcctgatgcagccatgccgcgtgtatgaagaaggccttcgggttgtaaagtactttcagcggggaggaagggagtaaagttaatacctttgctcattgacgttacccgcagaagaagcaccggctaactccgtgccagcagccgcggtaatacggagggtgcaagcgttaatcggaattactgggcgtaaagcgcacgcaggcggtttgttaagtcagatgtgaaatccccgggctcaacctgggaactgcatctgatactggcaagcttgagtctcgtagaggggggtagaattccaggtgtagcggtgaaatgcgtagagatctggaggaataccggtggcgaaggcggccccctggacgaagactgacgctcaggtgcgaaagcgtggggagcaaacaggattagataccctggtagtccacgccgtaaacgatgtcgacttggaggttgtgcccttgaggcgtggcttccggagctaacgcgttaagtcgaccgcctggggagtacggccgcaaggttaaaactcaaatgaattgacgggggcccgcacaagcggtggagcatgtggtttaattcgatgcaacgcgaagaaccttacctggtcttgacatccacggaagttttcagagatgagaatgtgccttcgggaaccgtgagacaggtgctgcatggctgtcgtcagctcgtgttgtgaaatgttgggttaagtcccgcaacgagcgcaacccttatcctttgttgccagcggtccggccgggaactcaaaggagactgccagtgataaactggaggaaggtggggatgacgtcaagtcatcatggcccttacgaccagggctacacacgtgctacaatggcgcatacaaagagaagcgatctcgcgagagcaagcggacctcataaagtgcgtcgtagtccggattggagtctgcaactcgactccatgaagtcggaatcgctagtaatcgtggatcagaatgccacggtgaatacgttcccgggccttgtacacaccgcccgtcacaccatgggagtgggttgcaaaagaagtaggtagcttaaccttcgggagggcgcttaccactttgtgattcatgactggggtgaagtcgtaacaaggtaaccgtaggggaacctgcggttggatcacctccttaccttaaagaagcgtactttgcagtgctcacacagattgtctgatgaaaatgagcagtaaaacctctacaggcttgtagctcaggtggttagagcgcacccctgataagggtgaggtcggtggttcaagtccactcaggcctaccaaatttgcaccgcaaatttgaannggttttaactanatnttntggggctnnagcncagctgggagagcgcctgctttgcacgcaggaggtctgcggttcgatcccgcatagctccaccatctctgtagtgattaaataaaaaatacttcagagtgtacctgcaaaggttcactgcgaagttttgctctttaaaaatctggatcaagctgaaaattgaaacactgaacaacgagagttgttcgtgagtctctcaaattttcgcaacacgatgatgaatcgcaagaaacatcttcgggttgtgaggttaagcgactaagcgtacacggtggatgccctggcagtcagaggcgatgaaggacgtgctaatctgcgataagcgtcggtgaggtgatatgaaccgttataaccggcgatttccgaatggggaaacccagtgtgtttcgacacactatcattaactgaatccataggttaatgaggcgaaccgggggaactgaaacatctaagtaccccgaggaaaagaaatcaaccgagattcccccagtagcggcgagcgaacggggaggagcccagagcctgaatcagtgtgtgtgttagtggaagcgtctggaaaggcgtgcgatacagggtgacagccccgtacacaaaaatgcacatattgtgagctcgatgagtagggcgggacacgtggtatcctgtctgaatatggggggaccatcctccaaggctaaatactcctgactgaccgatagtgaaccagtaccgtgagggaaaggcgaaaagaaccccggcgaggggagtgaaaaagaacctgaaaccgtgtacgtacaagcagtgggagcctcttaatggggtgactgcgtaccttttgtataatgggtcagcgacttatattctgtagcaaggttaaccgaataggggagccgaagggaaaccgagtcttaactgggcgttaagttgcagggtatagacccgaaacccggtgatctagccatgggcaggttgaaggttgggtaacactaactggaggaccgaaccgactaatgttgaaaaattagcggatgacttgtggctgggggtgaaaggccaatcaaaccgggagatagctggttctccccgaaagctatttaggtagcgcctcgtgaattcatctccgggggtagagcactgtttcggcaagggggtcatcccgacttaccaacccgatgcaaactgcgaataccggagaatgttatcacgggagacacacggcgggtgctaacgtccgtcgtgaagagggaaacaacccagaccgccagctaaggtcccaaagtcatggttaagtgggaaacgatgtgggaaggcccagacagccaggatgttggcttagaagcagccatcatttaaagaaagcgtaatagctcactggtcgagtcggcctgcgcggaagatgtaacggggctaaaccatgcaccgaagctgcggcagcgacactatgtgttgttgggtaggggagcgttctgtaagcctgtgaaggtggcctgtgagggttgctggaggtatcagaagtgcgaatgctgacataagtaacgataaagcgggtgaaaagcccgctcgccggaagaccaagggttcctgtccaacgttaatcagggcagggtgagtcgacccctaaggcgaggccgaaaggcgtagtcgatgggaaacaggttaatattcctgtacttggtgttactgcgaaggggggacggagaaggctatgttggccgggcgacggttgtcccggtttaagcgtgtaggctggttttccaggcaaatccggaaaaccaaggctgaggcgtgatgacgaggcactacggtgctgaagcgacaaatgccctgcttccaggaaaagcctctaagcatcaggtaacatcaaatcgtaccccaaaccgacacaggtggtcaggtagagaataccaaggcgcttgagagaactcgggtgaaggaactaggcaaaatggtgccgtaacttcgggagaaggcacgctgatatgtaggtgaagcgacttgctcgtggagctgaaatcagtcgaagataccagctggctgcaactgtttattaaaaacacagcactgtgcaaacacgaaagtggacgtatacggtgtgacgcctgcccggtgccggaaggttaattgatggggttagcggtaacgcgaagctcttgatcgaagccccggtaaacggcggccgtaactataacggtcctaaggtagcgaaattccttgtcgggtaagttccgacctgcacgaatggcgtaatgatggccaggctgtctccacccgagactcagtgaaattgaactcgctgtgaagatgcagtgtacccgcggcaagacggaaagaccccgtgaacctttactatagcttgacactgaacattgagccttgatgtgtaggataggtgggaggctttgaagtgtggacgccagtctgcatggagccgaccttgaaataccaccctttaatntttgatnttntaacgttggccnnnanncnggntnnngnnnnnnnnnngnnggnnnnttnnnnngggnngnnnncnncnnaannnnnanngnngnnnnnnnangntngnnnanncnngnnngnnnnnnngnngntnnnnnnanngnnnnanncnnnntnnnnnnnnnnnnnnnngnnnnnnnnngnnnnnaannnngnnnnnnnnnnncngnnnntnnnnanngnnnggncnnnnnnnnnnngnnnaaangnnnnncngggnnnannngnnnnnnncnnccnannnntnnnnnnnnnnnnngnnnttngnnncnnnnnnnnnnnnnnnnnnnnnnnngggnnnnnnnnngnnccnanggnnnngnnnntnnncnntnnaannnnnnnnncgagctgggtttagaacgtcgtgagacagttcggtccctatctgccgtgggcgctggagaactgaggggggctgctcctagtacgagaggaccggagtggacgcatcactggtgttcgggttgtcatgccaatggcactgcccggtagctaaatgcggaagagataagtgctgaaagcatctaagcacgaaacttgccccgagatgagttctccctgactccttgagggtcctgaaggaacgttgaagacgacgacgttgataggccgggtgtgtaagcgcagcgatgcgttgagctaaccggtactaatgaaccgtgaggcttaaccttacaacgccgaagatgttttggcggatgagagaagattttcagcctgatacagattagattaaccggcgacaagcgggttaatgaaacagaatttgcctggcggccttagcgcggtggtcccacctgaccccatgccgaactcagaagtgaaacgccgtagcgccgatggtagtgtggggtctccccatgcgagagtagggaactgccaggcatcaaattagaaaaaccccggtcaataaggccggggttttttgcatatcaattatttgcatgatgaagggaatctcatgtcagttctgtatatccaaattcgtcgtaatcaaattactgttcgcgatcttgaaagcaaacgtgaagtgtcaggagatgctgccttcagtaaccagcgcctgttaatcgccaatttctttgttgcagaaaaagttctgcaagatcttgttctgcaactccacccacgttcaacctggcattcttttttgccagcaaaacgtatggatattgttgtgagcgcgctggaaatgaatgagggcggtttgtcacaggttgaggaacgcattcttcatgaagtggtcgcaggggcaacgttaatgaaatatcgccagttccacatccatgcgcaatcagtggtactcagtgatagtgcggtcctggcaatgtttaagcagaaataatcatgtcaccattggtgggtacgaaacctaaagttcagcccaccgggatgagaaaaaaaccgcctacacccccacatatgccagattcagcaacggatacggtttccccaaatcgtccacctcagagcgttccgtaaccttaaagcccaccttcttatagaacccaaccgcctgctcattttgctcattaacattggttgtcagttccggggccattgagagcgcatgcttcaccagcatccggcccacgccgcagccgcgcacatcaggatcgataaacagcgcatccatatgctgcccacttaacaacataaacccaaccggctgatcccgctcattaaccgcgacccacaacggtgcttccggcagaaaggaatgcaccagctcttccagctcggcccgatactctgctgataaaaaatcgtgagtggcatcgacagaacgacaccaaatcgcaacgagttcctccccctcctcatgccgtgagcggcgaatactaataaccattttctctccttttcgtcattcttatattctaacgtagccttttccttgaaactttctcaccttcaacatgcaggctcgacattggtaaattttctggttatcttcagctatctggatgtctaaacgtataagcgtatatagtgaggtaatcaggttatgccgattcgtgtgccggacgagctacccgccgtcaatttcttgcgtgaagaaaacgtctttgtgatgacaacttctcgcgcgtctggtcaggaaattcgtccgctaaaggtgcttatccttaacctgatgccgaagaagatcgaaactgaaaatcagtttctgcgcctgctttcaaactcacctttgcaggtcgatattcagcttttgcgcatcgattcccgtgaatcgcgcaacacgcccgcagagcatctgaataacttctactgtaactttgaagatattcaggaacaaaactttgacggtctgatagttaccggcgcgccactgggcctggtggagtttaatgatgtcgcttactggccgcagatcaaacaggtgctggagtggtcgaaagatcacgtcacctcgacgctgtttgtctgctgggctgtacaggccgcgctcaatatcctctatggtattcctaagcaaacccgcaccgacaaactctctggcgtttacgagcatcatattctccatcctcatgcgcttctgacgcgtggctttgatgattcattcctggcaccgcattcgcgctatgctgactttccggcagcgttgattcgtgattataccgatctggaaattctggcagagacggaagaaggggatgcatatctgtttgccagcaaagataagcgcattgcctttgtgacgggccatcccgaatatgatgcgcaaacgctggcgcaggaatatttccgcgatgtggaagccgggctagacccggatgtaccgtataactatttcccgcacaatgatccgcaaaatacaccgcgagcgagctggcgtagtcacggtaatttgctgtttaccaactggctcaactattacgtctaccagatcacgccatatgatctacggcacatgaatccaacgctggattaatcttctgtgatagtcgatcgttaagcgattcagcaccttacctcaggcaccttcgggtgccttttttatttccgaaacacacctcagtaagtgaataaattttatttatattgttatcaataagttaacatgtatttttaattaaaatggaaattgtttttgattttgcattttaaatgagtagtcttagttgtgctgaacgaaaagcgcacaacgatccttcgttcacagtggggaagttttcggatccatgacgaggagctgcacgatgactgaacaggcaacaacaatcgatgaactggcttttacaaggccgtatggcgagcaggagaagcaaattcttactgccgaagcggtagaatttctgactgagctggtgacgcattttacgccacaacgcaataaacttctggcagcgcgtattcagcagcagcaggatatcgataacggaatgttgcctgattttatttcggaaacagcttccattcgttatgctgactggaaaattcgcgggattccttcggacttagaagatcgtcgcgtagagattaccggacctgtagagcgcaagatggtgatcaacgcgctcaacgccaatgtgaaagtctttatggccgatttcgaagattcactggcaccagactggaacaaagtgatcgatgggcaaattaacctgcgcgatgcggttaacggcaccatcagctatagcaatgaagcaggcaaaatttatcagctcaagcccaatccagcggttttgatttgtcgggtacgcggtctgcacttgccggaaaaacatgtcacctggcgtggtgagacaatccccggtagcctgtttgattttgcgctctatttcttccacaactatcaggcactgttggcaaagggcagcggtccctatttctatctgccgaaaacccagtcctggcaggaagcggcctggtggagcgaagtcttcagctatgcagaagatcgctttaatctgccgcgcggcaccatcaaggcgacgttgctgattgaaacgctgcccgccgtgttccagatggatgaaatccttcacgcgctgcgtgaccatattgttggtctgaactgcggtcgttgggattacatcttcagttatatcaaaacattgaaaaactatcccgatcgcgtcctgccagacagacaggcagtgacgatggataaacccttcctgaatgcttactcacgcctgttgattaaaacctgccataaacgcggtgcttttgcgatgggcggcatggcggcgtttattccgagcaaagatgaagagcgcaataaccaggtgctcgacaaagtaaaagcggataaatcgctggaagccaataacggtcacgatggcacatggatcgctcacccgggccttgctgatacggcaatggcggtattcaacgatattctcggctcccgcaaaaaccagcttgaggtgatgcgcgaacaagacgcgccgattactgccgatcagctgctggcaccttgtgctggtgaacgcaccgaagaaggtatgcgcgccaacattcgcgtggctgtgcagtacatcgaagcgtggatctctggcaatggctgtgtgccgatttatggcctgatggaagatgcggcgacggctgaaatttcccgtacctcaatctggcagtggatccatcatcaaaaaacgttgagcaatggcaaaccggtgactaaagccttgttccgccagatgctgggcgaagagatgaaagtcattgccagcgaactgggcgaagaacgtttctcccatgggcgttttgacgatgccgcacgcttgatggaacagatcaccacttccgatgagttaattgatttcctgaccctgccaggctaccgcctgttagcgtaaaccaccacataactatggagcatctgcacatgaaaacccgtacacaacaaattgaagaattacagaaagagtggactcaaccgcgttgggaaggcattactcgcccgtacagcgcggaagatgtggtgaaattacgcggttcagtcaatccggaatgcaccctggcgcaactgggtgcggcgaaaatgtggcgtctgctgcacggcgagtcgaaaaaaggctacatcaacagcctcggtgcactgactggcggtcaggcgctgcaacaggcgaaagcgggtattgaagcagtctatctgtcgggatggcaggtagcggcggacgctaacctggcggccagcatgtatccggatcagtcgctctatccggcaaactcggtgccagcggtggtggagcggatcaacaatactttccgccgtgcggatcagatccaatggtccgcgggcattgagccgggcgatccgcgctatgtcgattacttcctgccgatcgtcgccgatgcggaggccggttttggcggtgtactgaatgcctttgaactgatgaaagcgatgattgaagccggtgcagcggcagttcacttcgaagatcagctggcatcagtgaagaaatgtggtcacatgggcggcaaagttttggtgccaactcaggaagctattcagaaactggtcgcggcgcgtctggcagctgatgtgacgggcgttccaaccctgctggttgctcgtaccgatgccgatgcggcggatctgattacctccgattgcgacccatatgacagcgaatttattactggcgagcgtaccagtgaaggcttcttccgtactcatgcgggtattgagcaagcgatcagccgtggcctggcgtatgcgccatatgctgacctggtatggtgtgaaacctccacgccggacctagaactggcgcgtcgctttgcacaagccatccacgcgaaatatccgggcaaactgctggcttataactgctcgccgtcgttcaactggcagaaaaacctcgacgacaaaactattgccagcttccagcagcagctgtcggatatgggctacaagttccagttcatcaccctggcaggtatccacagcatgtggttcaacatgtttgacctggcaaacgcctatgcccagggcgagggtatgaagcactatgttgagaaagtgcagcagccggaatttgccgccgcgaaagatggctataccttcgtatctcaccaacaggaagtgggtacaggttacttcgataaagtgacgaccattattcaaggtggcacgtcttcagttaccgcgctgaccggctccaccgaagaatcgcagttctaagcaaccgataaacgttgctgactgtaggccggataaggcgttcacgccgcatccggcaatcagcgcctgatgcgacgcttgcgcgtcttatcatgcctacagccgttgccgaacgtaggccggataaggcgttcacgccgcatccggcaatcagcgcctgatgtgacgcttacgcgtcttatccggcaattctctgctcccgacgagggcaacaaatgccgcgtggcctggaattactgattgcacaaaccattttgcaaggtttcgacgctcagtatggtcgattcctcgaagtgacttccggggcgcagcagcgtttcgagcaagccgactggcatgctgtccagcaggcgatgaaaaaccgtattcatctttacgatcatcacgtgggtctggtcgtggagcaactgcgctgcattactaatggccaaagcacggacgcggcatttttactgcgcgttaaagagcattacacccggctgttgccagattacccgcgcttcgagattgcggagagctttttcaactccgtgtactgtcggttatttgaccaccgctcgcttactcccgagcggctttttatctttagctcccagccagagcgccgctttcgtaccattccacgcccactggcgaaagactttcaccccgatcacggctgggaatctctgctgatgcgcgttatcagcgatctgccgctgcgtctgcgttggcagaataaaagccgtgacattcattacatcgttcgccatctgacggaaacgctggggacagacaacctcgcggaaagtcatttacaggtggcgaacgaactgttttaccgcaataaggcagcctggctggtgggcaaactgatcacgccttccggcacgttgccatttttattgccgatccaccagacggacgacggcgagttatttattgatacctgcctgacgacgaccgccgaagcgagcattgtttttggctttgcgcgttcttattttatggtttatgcaccgctgcccgcagcgctggtcgagtggctacgggaaattctgccaggtaaaaccaccgctgaattgtatatggctatcggctgccagaagcacgccaaaaccgaaagctaccgcgaatatctcgtttatctacagggctgtaatgagcagttcattgaagcgccgggtattcgtggaatggtgatgttggtgtttacgttgccgggttttgatcgagtattcaaagtcatcaaagacaggttcgcgccgcagaaagagatgtctgccgctcacgttcgtgcctgctaccaactggtgaaagagcatgatcgcgtgggccgaatggcggacacccaggagtttgaaaactttgtgctggagaagcggcatatttccccggcattaatggaattactgctccaggaagcagcggaaaaaatcaccgatctcggcgaacaaattgtgattcgccatctctatatcgaacgacggatggtgccgcttaatatctggcttgagcaagttgaggggcagcaattgcgtgatgccattgaagagtacggcaacgccattcgccagcttgccgctgccaacatcttccctggggatatgttatttaaaaactttggcgtcacccgtcacgggcgcgtggtgttttatgattacgacgaaatttgctacatgacggaagtgaatttccgcgacatcccgctgccgcgctacccggaagacgaacttgccagcgaaccgtggtacagcgtctcgccgggcgatgttttcccggaagagttccgtcactggttatgtgccgacccgcgtattggtccgctatttgaagagatgcacgccgacttgttccgcgctgattactggcgcgcactacaaaaccgcatacgtgaagggcatgtggaagatgtttatgcgtatcggcgcaggcagcggtttagcgtccgattcgtataaatcagaggcgaaaaagtcagcgtattccaccgtacgccagcgtcacttccttcgccgctttaatcaccatcgcgccaaactcggtcacgcggtcatcggtaatacgtgaaatcggtccggaaattgaaattgcggcaaacggttcgcggtgctcatcgaaaatacacgctgcaaggcaacgcagccccagcgcatgttcctcatcgtcaaatgaataaccccgtttgcgcgtttgggcgagatcttcttttaaatgcacaggagacaccagcgtcgcgtgggtataggcatgtaaccctttgcggtgcagcagcttcgtcacctgttcttcgctcagttgggccagaaaggctttacccgcaccggaagcgtgcatcggcaatttaccgccgataggcgcggacatacgcatcaggtgagtacactgtacctggtcgataataatcgcttcgtgattgctttgatcaagcaccgccatattgaccgtttcgccagactcttccattagattgcgcaggatagggtgaacaatcgctaacaaattacggctctggagaaagctgctaccgaccataaaggcgtgtgcgccgattgcccagtgacccagttcgccgacctgacggacaaagccctgttgctgcatcgtggttagcaggcggtgggtcgtggaattgggtaacccggcttgctgtgccagttccgtgagtgccacactgccattggattcggcaatccactccagtaatttcaggccacgcgttaaagactgaacctgtccagtcgctggtgcggtggcaacggcgggttttctgccgcgttttgcgggaatgggtgcgaccatgacagtctcctttttctgtatcgtggaaatcattttcatttttattatcagcgaatgcaatagttgctgaacagatccgatgagttaatgttgaacaaatctcatgttgcgtggtggtcgcttttaccacagatgcgtttatgccagtatggtttgttgaatttttattaaatctgggttaagcgtgtcgggagcaagtgtgagcagcaaagtggaacaactgcgtgcgcagttaaatgaacgtattctggtgctggacggcggtatgggcaccatgatccagagctatcgactgaacgaagccgattttcgtggtgaacgctttgccgactggccatgcgatctcaaaggcaacaacgacctgctggtgctcagcaaaccggaagtgatcgccgctatccacaacgcctactttgaagcgggcgcggatatcatcgaaaccaacaccttcaactccacgactattgcgatggcggattaccaaatggaatccctgtcggcggaaatcaactttgcggcggcgaaactggcgcgcgcctgtgctgacgagtggactgcccgcacgccggagaaaccgcgctacgttgccggtgttctcggcccgaccaaccgcacggcgtctatttctccggacgtcaacgatccggcattccgcaacatcacttttgaccagctggtggcggcttatcgagaatccaccaaagcgctggtggaaggtggcgcggacctgatcctgattgaaaccgttttcgacacccttaacgccaaagcggcggtctttgcggtgaaaacggagtttgaagcgctgggcgttgaactgccgattatgatctccggcaccatcaccgacgcctccgggcgcacgctctccgggcagaccactgaagcgttttacaactccctgcgccacgccgaagcgctgacctttggcctgaactgtgcgctggggccagacgaactgcgccagtacgtacaggaactgtcgcgtattgcggaatgctacgtcaccgcccacccgaacgccgggctgcccaacgcctttggtgaatacgatctcgacgccgacacgatggcaaaacagatacgtgaatgggcagaagcaggctttctcaatatcgtcggcggctgctgcggcaccacgccacaacatattgcagcgatgagtcgtgcagtagaaggattagcgccgcgcaaactaccggaaattcccgtagcctgccgcttgtccggcctggagccgctgaacattggcgaagatagcctgtttgtgaacgtgggtgaacgcaccaacgtcaccggttccgctaagttcaagcgcctgatcaaagaagagaaatacagcgaggcgctggatgtggcgcgtcagcaggtggaaaacggtgcgcagattatcgatatcaacatggatgaagggatgctcgatgccgaagcggcgatggtgcgttttctcaatctgattgccggtgaaccggatatcgctcgcgtgccgataatgatcgactcctcaaaatgggacgttattgaaaaaggtctgaagtgtatccagggcaaaggcattgttaactctatctcgatgaaagagggtgtcgacgcctttatccatcacgcgaaactgttgcgtcgctacggtgcggcagtcgtggtaatggcttttgacgaacagggccaggccgatacccgcgcacggaaaatcgagatttgccgtcgggcgtacaaaatcctcaccgaagaggttggcttcccggctgaagatatcatcttcgacccgaacatcttcgcggtcgcaactggcattgaagagcacaacaattacgcacaggactttatcggcgcgtgtgaagacatcaaacgtgaactgccgcacgcactgatttccggcggcgtttctaacgtgtcgttctcgtttcgtggcaacgatccggtgcgcgaagccattcacgcggtgttcctctactacgctattcgcaatggcatggatatggggatcgtcaacgccgggcaactggcgatttacgacgacctgcctaccgaactacgcgacgcggtggaggatgtgatcctcaaccgtcgcgacgatggcaccgagcgtttactggagcttgccgagaaatatcgcggcagcaaaaccgacgacaccgctaacacccagcaggcggagtggcgctcgtgggaagtgaataaacgtctggaatactcgctggtcaaaggcattaccgagtttatcgagcaggataccgaagaagcccgccagcaggctacgcgtccgattgaagtgattgaaggcccgttgatggacggcatgaacgtggtcggcgacctgtttggcgagggcaaaatgttcctgccgcaggtggtgaaatcggcgcgcgtaatgaagcaggcggtggcgtatctcgagccgttcattgaagccagcaaagagcagggtaaaaccaacggcaagatggtgatcgccacagtgaagggtgatgtccacgacatcggtaaaaatatcgttggcgtggtgctgcaatgtaacaactacgaaattgtcgatctcggcgtgatggtgcctgcggaaaaaattctccgtaccgctaaagaagtgaatgctgatttgattggcctttcggggctgatcacgccgtcgctggacgagatggttaacgtggcgaaagagatggagcgtcagggcttcaccattccgctattgattggcggcgcgaccacctcaaaagcgcacacggcggtgaaaatcgagcagaactacagcggcccgacggtgtatgtgcagaacgcatcgcgcaccgttggtgtggtggcggcgctgctttccgacactcagcgcgatgatttcgttgctcgtacccgcaaggagtacgaaaccgtgcgtattcagcacggacgaaagaaaccacgcacaccaccggtcacgctggaagcggcgcgtgataacgacttcgcttttgactggcaggcttacacgccgccggtggcgcaccgtctcggtgtgcaggaagtcgaagccagcatcgaaacgctgcgtaattacatcgactggacgccgttctttatgacctggtcgctggccgggaagtatccgcgcattctggaagatgaagtggtaggtgttgaggcgcagcggctgtttaaagacgccaacgacatgctggataaattaagcgccgaaaaaatgctgaacccgcgtggtgtggtgggcctgttcccggcaaaccgtgtgggcgatgacattgaaatctaccgtgacgaaacgcgtacccatgtgattaatgtcagccaccatctacgccaacagaccgaaaaaaccggcttcgctaactactgtctcgctgacttcgttgcgccgaaggtttccggcaaagcggattacatcggcgcatttgccgtgactggcgggctggaagaggacgcactggctgatgcctttgaagcacagcatgatgattacaacaaaatcatggtgaaagcgcttgccgaccgtctggcggaagcctttgcggagtatctccatgagcgtgtgcgtaaagtctactggggctatgcgccgaacgagaacctcagcaacgaagagctgatccgcgaaaactaccagggcatccgtccggcaccgggctaccctgcctgcccggaacatacggaaaaagccacaatctgggagctgctggaagtggaaaaacataccggtatgaaactcacggaatccttcgccatgtggccgggtgcatcggtttcgggttggtacttcagtcatccagacagcaagtattacgcggtggcgcaaattcagcgcgatcaggttgaagactatgcccgccgtaaaggaatgagcgttaccgaagtcgagcgttggttggcaccgaatctggggtatgatgccgagtaagtgataacaccggggtatttgccccggtttttaatgtcataaataatggattattgaacatgataaaaattgatgaaatagattttttcgctttcgaaggatgttcagagtccgaagttactgaactattaggaaaaaaaccaacaggttataatgattggatgattaatataaaaacaggtgtggagtgggtattttatgatggtcgttattggttagattttcgtaaatccaaagagggtataaggtgtatctcatgcagtattctgtatcacgataaaagtaaagggcgtatcgatgtcttatttagtgaaggtatagctgacagaggtttaaaaaatacgggtggagtgttaatccaaaaacgcccgcaattataataattcctggtaatatttgttttcgtaaaaaggatttactttatgcaacgtcaatataaaaaatacattcttcttttttggggtgtcatggatgttatcgcgatagccacatatctgttctactcgcttggtaatggtcgtatccctttttattccgatatcgttcattcactttctttacttaaggatatcggtgttgaaggcggtttttacgcttatgcagtcgccactgttacgctacaaatagtattattgctctctttattcttttctgcgcaatgttttttaagacaaaaattatttagtttctcttttttggcgattcaggaagttatgcgttttgctaccgtaagctgctcaatctccgtaataccgttgttacttaattattttcattcacagaatctggtcttaaatatttcgttgtttatcttctcagaggtcacaaaagtgacaacgattatctggtgtaaacgacaggggaaagtgtgacagaaatagcaacagatacaggtggatttttatataaatgcctttttaaatgctttcttgtataaatctcttatactgaaagtacatacaagagaaatgcctggataaaaacaacgtgattagaaaaatcttaacaggaaaatgcataacaaaaaggagaacctgattccgtgctaactttgcttcacctgctttctgccgtcgccctgctggtctgggggactcatattgttcgaacaggcgtaatgcgcgtcttcggcgcgcgtctgcgtactgtccttagccggagcgtcgaaaaaaagccgctcgccttttgcgcggggatcggcgttaccgcactggtgcagagcagtaatgccaccaccatgctggtgacctcgttcgtcgctcaggatctggttgctctcgcgcctgcgctggtgattgtgctgggtgcagatgtcgggacggcgctgatggcgcgtattctcaccttcgatttatcctggctgtcaccgttacttatttttatcggcgtgatttttttcctcggacgcaaacagtcacgcgccgggcaactgggccgcgtcggtattggtcttgggctgattttactggcgctggagttgattgtgcaggccgtaacgccgatcactcaggcaaacggcgttcaggtgatctttgcctcgctgactggcgacattttgctggatgcgctgattggtgcgatgttcgccattatcagctactccagccttgccgcggtactgctgaccgcgactctgaccgccgcaggcattatctctttcccagtggcgctttgtctggtgattggtgcaaacctcggttccggcctgctggcgatgctcaacaacagtgccgccaatgccgcagcccgccgtgtcgcgctgggtagcctgctgtttaagctggtgggtagcctgattatcctgccgtttgttcatttgctggcagagacaatggggaagttgccattgccaaaagcggaattggtgatctatttccacgtcttctacaaccttgtacgctgcctggtcatgttgccattcgttgacccgatggcacggttttgcaaaacgattattcgcgatgaaccggaactggatacccagctacggcctaaacatctggatgtcagcgcgctggatacgcccacgcttgctctggcgaacgctgcccgcgaaaccctgcgcattggcgacgccatggaacagatgatggaagggttgaataaagtgatgcacggcgagccacggcaggagaaagagctgcgtaagctggctgatgacatcaacgttctctataccgccattaagctgtatctggcgcggatgccaaaagaggaactggcagaagaagagtcgcgccgctgggcggagatcatcgaaatgtcgctcaaccttgaacaagcctccgatatcgtcgagcgcatggggagtgaaattgccgacaaatcgctggcagcaaggcgagcattttcgcttgatggcttgaaggaactggatgcgctctatgagcaattgctcagtaatttaaaactggcaatgtcggttttcttctctggcgatgttaccagcgcccgtcgtttgcgccgcagcaaacatcgttttcgcattcttaatcgccgctattcccacgcccacgtcgatcgcctgcaccagcaaaacgtgcagagtattgaaaccagttcgctacatttaggcttactgggagatatgcagcgtctgaactcgctgttttgttcggtggcttacagtgtgctggaacagccggatgaagatgaaggacgggacgagtattaataccgtgaccctgaaggcctgataagacgcgtaaagcgtcgcatcaggcactatgaacaagatgccggatcatgtatccggcaattcacttaaaaacggtgacccgcttccagcggcaccgcttcttcaccagccttaaacacataagtggtgttcgggccacccagcgtagcgtgacctttacttactgtgatccagttaccttccggcagaccaataatcgtcagttctggcgcgacgaccagcagttcgcgaatacgctgctcacgggtttcacctttatggccttccggcagcgcgttggtgaagtgcgggttgatttgcagcgggaacagatttagcgcatcgaaaccttgcggatcgacaatcggcatatcgttggtggtacgaatggttgggcaagcaaggttagcgcctgcgctccagccaatatacagcgcgccacgtttcaccacgtcagtaattggtgccagcagcccacgctcgcggcactgtttcagcaactggaaagtattaccgccgccgacaatcacaatttccgcattttcaatcgcggcaacgggatcgacaacgctatgaataccggtgacagaaacacccagcgaagcgagaaccgcagcagttttcgctgtgtaatcatcccaggtctgcgttacgccagcgaaaggaataaataccgcagaacggcgaccctgcaactgttcagcaatcagcggcagcgcgtgttccagccaggctttacccggcagcgtcgagttactcaataaaagcagttccattacttctccggttagtaagaaaacacggaaggaatgctaccactgcgaatttaaccacttactgacatggctcacgatgtcacatattgcacaggcgctgagactgatgacaaacacaggattgcctgatgcgctacgcttacctggcctaccagataactgcaatatattgaattttcaagattatgtaggccgaataaggcttcattccgtatccggcataaacaatgtgtactttgccaccaatttgagcgccccttaaggcgctgatgtttttttattcttctcgtgcacattgtgccgcttcagcaatcagccgcacatcaggtcgcgaagttgccgcggcgaccagccagcgacatgcagagttaagtagcgcgattaatcatgggaaattgcctctgcatgggcgagcaggtattgctccgcctcaccggaccagatcccctgatgacgcgccagaatcgccgccagtgcttgatcctgaatctgcgtgagtgacgtcagcggcaggaatttcccggtatacaccagctttttgccgccgccgacggcaggcaattcaagcgtggtttcgcccgcggcattcagcccaagaatatgtgttaccacttttgcggcctgcacttttttctcttcaatcaatttgaccgctgcgcgcatgtcgtcgatattgccgcctgacgtgcccacgtagtgggtaaatgcataatgcacatcgtagaaattaattggcgcgctgaagtgcttatcctgcggtccggcgaagaaattcagacaaccatctgttgccagcaaggaagaggcgagagtcaccagtccttcattaggcacaaagacgaaaatatcatcgaagccgtgaccgccactcagtgccattaacgtatcaaatgctgcatcggcggcattgagataatgaatcagtgtttgcggttctgatggatagtgcttgcgtgcataactcaatttgtcgttgtcggtatcggtaatgacgagcagcgacgggttaaccggtccatgcaacgcataatcaatcgccagcagccccatcgggccggtgccgccgaggatcagcgtgcgcccttgcgggcgaatccccatcgtgtggttataactaccttcctgaagatgatagttggcgttgaacgcgccaatcacgcaggaaagcggttcaaccagcgagccttcaaaataggtttcgccgtcgtatgccagcaggcaatcttgttccatgacctcgttgggaataaccacatgcgtcgcttcgccgcctacccacgggaaggagtagccggggcaatccgggcggtcggggagttgcaggttggcctgaatcacataacgctgacccggctggaatttgtgctgccactttttacccacggccagaatatcgccgcaaaattcgtggccgatgatgatgggattggtcgccacatcgtcgggtacttttttatggttttcacccagattggcctctttccaggaagagaggcacaggctgtcagtgaccaccgttgcgaggatttcatcctcctgcatttcaggaaggtcaaaggtttccagacgcaggtcacgtttgccataaagacgcagagctgttgttttcataaaccacctcatgttgaacgatggccccgacggttgcgccggggcgaagaatcaggacaggaagcccagcgcattaccgataatccctaaaccaaacagggcgaaaatcagccataccgggttaatttttttgttgagcagacgaaccatcagcagcgtcagaccgagcgccagcaaaccagggcaaagttggtcgaggatgttctgcacggttatggtgacggtggcaccatcggcggcaggcgtttgtgaaaccaccaacggtacgttgattgacgtccatttggtcaccagcacgcccatcacaaacagcccgagaatcgacgcgccttcggtgagtttttgcagcaaattaccgcccatatcgctgacgatattcacccctttgcgaaagccgagctgtaggccataccacttcatcgccagacgcaccgcgttgaaaataaagaagaacagcagggggccgagaatgttgcccgaaagtgccagagatgcgccgagcgcggcggtaatcgggcgcagcgttccccagaccagtggatcgccaactcctgccaatggtcccatcagaccgactttgatgccgttaatggtaccgtcatcaatttccgcgccgttggctcgcgcctcttccatggcggcagtgacgccgatgaccgggccacatacggctggcgtggtattgaagaacaccaggtgtcgcctgagcgccgcaacctgatcctcttttaatgggtaaagtcgtttgatggcggggatcatgtcgtagcaaaaacccagcccgtgaatacgttcaaagttaaaggatgcctgttgcaggttggagcgcagaaacatgctcaccagatcgctgcgtgtaatttttctctgttccatgatggctccgttaatcatcaagttggtcaagggcggtgatagtggtggtctggggatgtggttcagctttacgccactgtggatttaactggatgtagagcagggccatgatcacgccgacgccaccgaacgccagcagactgagatcgaggtagccacctgcgaggaaaccgaggaaaaagaaaggcatcaaatatttcacgcccatcatgcgaagcaccatggcgtaaccgaccaccacgataaaaccgccagcaatctgcagtccacgggtcacaaattcgggaatggcgctcagcatattgctcaccatatctgcgctgacgaacagcgagacaatcagtgccggaatagcaacgcgcagtgcctgcacgccaagcgcggagacatgcagaatatcgagagtgcgaaaccgtgcttcttccgctgctttatccgccgcgtgctggaacactacggtgatggtacgggcaaacaccgtcagcacctggcctgccgcagccacaggcaacgcgatggcgattccggtggcgatgctttgctgaccaacgataaccagaatggcggagattatgctggcgagtgcagaatccggagattgcgccgcgccgacgttcatccagccgagagctatcaattccagcgtaccaccgagcataattccggtttttaaatcaccgagaattaaaccaatcaccgtacaggcaattaacggacgatgagtctgaaattcatccagcacgctgcccattccggcaatacaggaaaaaagaaatatagcaatgatttgtagggtacttatttccatgatttgtcaccttttaagtgtcgtcatccctgcctgttaaagcatatgtacacaggcgctattatttaatttgcgattaactgttcgtttattttgtcgataatattgattgagggatctgacgctacgacgcgtaaatccagtatgacgccaagattatttaactcatgaaatgcgttaatatcatcgtcatctaatgaaactgctttggttaactgtttcttaccaggacgccaggccataccgccaatattcagggtacctatttttaccccctggcgaaccattgctaaggcatcctgtgggcgagtgaaaagataaaaaacggtttcgtcctgatattgcgggttgtgataaaccgcgacggctttttcaatattgaccacgttaaccttcattcccggtggcgcagcctgacgcaataatgtccggcgaacttcatcgttataaacttcgtcattgcagataataatgcgttgggcgttagccactttagaccagacggtagtgacctggccgtggatcaggcggtcatcaatgcgggcgagcgtaatgttcatcagaaatcctcctccgctgttgccacctgtctccagacgacgcaggtttgctttgcgatttgcgtcaggtgttcacacagttcatcaatattcatgctgtcctggttatcaaccagttcgagcgccagcggcagagaaaggccgctgattacccgcagacgaggattgcgcatcgcaagcatcgctgccgcattccacgggctgccgcactgtaaatccacggcgattagccactcatcttgattgtgaatgcttactaacttctccagctttgccacaatgtctccggcgttctcgccgggcacaaattcaacggcctcgaccctggcatcgccgtacaccatctgaaccgattccagcatggcgcaggctaatttgccgtgggcgcaaaaaatggcattgaccataaagcctccttagccgcgcgttttgccgcctgcaatgttagtggttactccggtgatatagctggcgcgttcagacagcagataacaaacaaaatcagccacttctgctaatcttccggcgcgcccaataggaatggcgtttttggtatagccttcacgcagctgctcgacggtgatattgcgcgtccacgccagcgcttcttcatattccggcgtgcgcagtcctgttttttccagaatccccggcgcgataccgaccacacggataccgtgcttgcccagctctttcgaccaggagcgcgtgaagctattgagcgcggctttggtcgcggcgtaacagctttggccttctgagccttccagcccactttctgaggaaacattcacaatcacgccatcatgttgtttgaccatctgtcgcgccaccgcctgcgacatcagaaaaacgcctttctggttgatattgaccattttttcgaatgcagcttcgttgagttcatactgcccggcaggcgctttctcatcgacaagcagacgcgggaaattgaccccggcgttgttaaccagaccgtcgatgcgaccaaaacgctggataatttctgctaccgtatgatttatctctttggcgctggaaatatcggtcggccagaactgataacctttatggctttcatactgaccatcgccaccgtgaatatcgaccatctgtacattcgcgccttgtgctaataattcatccacaatcgccagaccaatgccggatgcgccaccggtgacaataatgattttatcctgcaaatttaaccacgtttgcataacagactcctgattttagataatagggacccgccgtaatttttattacggtaaacatcgggaagatttttatttcagtaatagttcagctgtgctgctattcgttaccagacaattaatatattttccacgcagtgcaccaacaattccgctgtatttttcttcgctcatggcaatgccaatggaataccgtgcctgctttaatttattcatttcgatagagagtgttttttcgctcatattcgtttcaaccattgcgccgtgaatatcaaaaaagcgcgagcaaatatcgccagcaacctggcgggcattcaggtcgtcactctcttcaccaccataaaacgcatgccagttagcgccgtcgcgaatggccggtgagccaattcccaccagggcgacatccagattatcccagtaggcagagatggttttaaagtgctgagactgcatgatcccattacgaattaatgggttatccagcagagccggaaaatccgcgagatgcgattcccctttcagcttcgctgccgcgctgtaggttaatgtgtttacgtgatagcggctttcgagtttaccggacgggccgccaataatcggcacgcaaattaactgccgcgattgccccgcctgcggcaagttttcaaccagtgcgctcaccgcgcggccccaggaaaaaccgacaatatcgccaggttccagcaagcgatccagcagttgcgcgccgtgtaaccccatcatcgccagttgagtatcttcatcctcatcatttcctgacaccaccacaacgtctttcaggctaaacttttgcttcacttgctgctccagccagagattttcgttgtagtcatagttgatggcgatggtgacaattccctgatcgcggcctcgtttaagcaagcggctgatggtagtgcgataaatacccagttcgcgcgcaatttgcgcctgcgtcatatcctgttcgtaatagagttgggcaatcttcacaatcaaacggatatcgtcactgttttccattgccgcctcctggttctgcacatttgtgcaaatacgctttctcaccgcttgatctgatataaccccatcatgatggcctttcaaagcgatttttcactctttgcatggggggaaatagcgctttctcttgcacatttgtttctctgcgtagtagtcatcagcacaggtgtgcagcgattcgtaatttgttgattattcttattttgccaggcaaatttgcatcgtacttccggagacacttttgtgataaaaggcgtggcagatcacatttaatttcgacgttgccgcataaccctgtttttccccgctaagaggtacggtatattccgcgttttacaggagaatttatgctgcccgactcatcagtccgtttaaataaatacatcagcgaaagcggaatttgctcacgccgcgaagcggatcgctatatcgagcaaggcaatgtgttccttaatggcaagcgagccaccattggcgatcaggtgaaacccggcgacgttgtgaaagtaaacggtcagttgattgagcctcgggaatccgaagatttggtacttatcgccctgaacaagcccgtcggtattgtcagcaccaccgaagatggcgagcgcgataacattgtcgatttcgttaaccacagcaaacgcgtgttcccgattggccgcctggataaagattcccaggggctgattttcctcaccaatcacggcgatctggtgaataagatcctccgtgcgggtaacgatcatgagaaagagtatctggtgacggttgataaaccgattaccgatgaatttattcgtggtatgggggcgggagtaccgatcctcgggacagtaactaaaaagtgcaaagtcaaaaaagaagcaccgtttgtcttccgcattaccctggtgcaggggctgaaccgtcagattcgtcgcatgtgcgagcactttggttacgaagtgaaaaagctggaacgtacgcgcattatgaacgtcagcttaagcggcattccgctgggtgagtggcgcgatttaaccgacgatgagttaatcgatctctttaagctcattgaaaattcctcttccgaggcaaaacctaaagcgaaggccaaaccgaaaacggtaggcatcaaacgtccagtcgttaagatggaaaaaacggcggaaaaaggcggtcgcccggcgtccaacggtaagcgttttacctcgccggggcgcaaaaagaaggggcgttaatcagcgcctgccgcgcgtcgacgtatttgctgaccagctaaatgacgcctcaggatccggtttataagcctgctttttcttcaattggcgggcttttttcgcttcagcctcacgctcgaccattaatttatcgatgtactctttcttaatgctgttagtttcggagttggtcagtacgcgaccatgcgcaatccgcgcccgatccagcagtgttttaagttcacgctgctcgcgttcagtcatctctttttgggtaatacgggggagtgccatgatggtgccctcagtgagccagagagttcagtgtacgggaattcgtttgcgagcagaactgataatattcattttgccttctcttaactatttatctctttcgataattagttagagatgcggataaaaaattaaaggcaattattctccgataaagacgctggttaacagagtacaggctcgtttatttatgggcataatgacaagaaaaacaatacggcccgaaataatgtcttccgggccatactgtgtttactcaaataaattaaaatgcagcttctgcactacctgctcggcatcttcgccgggcaccaggaagcacaggttatggctggatgcgccgtaacaaatcatgcgaatgttgaacggttccagtacgccgaatacctctttgccaacgccgcaggcttttgacaggtcattgccaatcaacgcgaccagcgccagaccctcttccacttccacccggcacagtgcggaaagctccatcagcagggattgcgtcagcaacgtatcgccagtggaggttgaaccggtggtatcaagggttaatgccacactcacttctgacgtggtgattaagtctaccgaaatattatgccgcgcgaggatgccgaaaacttccgcgaggaaaccgcgagaatgcagcatattcaggctgtgcaaagtgagcagagtctgattgcgacgaagcgccagcgcgcggaacagcggcggattttcagttttattgcacaccagcgtaccacctgcgcgtgggtctttgctggagccgacaaagactgggatatcgctgcgtactgcgggtagcaacgttgccggatgcagtacttttgcaccaaaagttgccatctctgccgcttcggcaaacgcgatttcatcaatgcgttttgctgcggaaaccacgcgcggatcggtggtgtagatgcccgggacgtcggtccagatatcaacacgagatgcgtgtaaagcctccgccagcaaggctgccgtataatcgctgcctccacggccaagcgtcgttgtacgacctttattttcgctgccgataaatccctgggtgatcactaagccttcattgaggcgtgggagcagctgcagcgcggccagttccgccagcgcggctacatctggctctgcacgaccaaatcgatcgttggtacgcatcactttacgtacatcaaaccactgtgcctgaacatcgcgttcgcgcaggatctcgacaaacagcagggtcgacatcagctcgccgtggctgaccagttcatctgtcagcgccggagacgttgccagcgccgccgcttctgccagaacagtaatgttctccagcagacgttcaatctcttcacggataacgttcgggtaacgcagacgttccagaatggcaaactggatgttgcgaatagcgtcgagtttttcgaatcgctcgccaggttccagtccttcagctaaagcgaccagcagattagtgataccagcagaagccgagaggacaactaaacgcacgttggcatcagaaagcacaatatcagcgctgcggttcatggcgtcaaaatcagctacgctggtaccgccaaatttggagacaacaatttcagacataactacctcgtgtcaggggatccattttcagccttggcacaagggaagagcggaagacgggtgggcgcagagcgatacttcgctactattttcacccagaagtgctccaccacttgcgaaacgcccgactgcgaacgcttctggtgacaacccaggggatttagcccctgtagccgatgatgaacgtggccagccgttcaatcacctcggcgatgcaccccctcaggtgttatcacaggactggctcctccaacaccgttacttgggcaacgcgcctcttctggcctgcgctagcgcaggtagtacatttataaataaagggtgagcggggcggttgtcaacgatggggtcatgcggatttttcatccactcctggcggtcagtagttcagctaataaatgcttcgctgcgctaagggtttacactcaacattacgctaacggcactaaaaccatcacatttttctgtgactggcgctacaatcttccaaagtcacaattctcaaaatcagaagagtattgctaatgaaaaacatcaatccaacgcagaccgctgcctggcaggcactacagaaacacttcgatgaaatgaaagacgttacgatcgccgatctttttgctaaagacggcgatcgtttttctaagttctccgcaaccttcgacgatcagatgctggtggattactccaaaaaccgcatcactgaagagacgctggcgaaattacaagatctggcgaaagagtgcgatctggcgggcgcgattaagtcgatgttctctggcgagaagatcaaccgcactgaaaaccgcgccgtactgcacgtagcgctgcgtaaccgtagcaataccccgattctggttgatggcaaagatgttatgccggaagtcaacgcggtgctggagaagatgaaaaccttctcggaagcgattatttccggtgagtggaaaggctataccggcaaagcaatcactgacgtagtgaacatcgggatcggcggttctgacctcggcccgtacatggtgactgaagcactgcgtccatacaaaaaccacctgaacatgcactttgtttctaacgtcgatgggactcacatcgcggaagtgctgaaaaaagtaaacccggaaaccacgctgttcctggtagcatctaaaaccttcaccactcaggaaaccatgaccaacgcccacagcgcgcgtgactggttcctgaaagcggcaggtgatgagaagcacgttgcgaaacactttgcggcgctctcaaccaacgccaaagccgttggcgagtttggtattgatactgccaacatgttcgagttctgggactgggtcggcggtcgttactctttgtggtcagcgattggcctgtcgattgttctctccatcggctttgataacttcgttgaactgctttctggcgcacacgcgatggacaagcatttctccaccacgcctgccgagaaaaacctgcctgtactgctggcgctgattggcatctggtacaacaatttctttggcgcggaaactgaagcgattctgccgtatgaccagtatatgcaccgtttcgcggcgtacttccagcagggcaatatggaatccaacggtaagtatgttgaccgtaacggtaaggttgtggattaccagactggcccgattatctggggtgaacctggcacgaacggtcagcacgcgttctatcagctgatccaccagggaaccaaaatggtaccgtgcgatttcatcgctccggctatcacccataacccgctctctgatcatcaccagaaactgctgtctaacttctttgctcagaccgaagcgctggcgtttggtaaatcccgcgaagtggttgagcaggaatatcgcgatcagggtaaagatccggcaacgcttgactacgtggtgccgttcaaagtgttcgaaggtaaccgcccgactaactccatcctgctgcgtgaaatcactccgttcagcctgggtgcgttgattgcgctgtatgagcacaaaatctttactcagggcgtgatcctgaacatcttcaccttcgaccagtggggcgtggaactgggtaaacagctggcgaaccgtattctgccagagctgaaagatgacaaagaaatcagcagccacgatagctcgaccaatggtctgattaaccgctataaagcgtggcgcggttaatcattgtcgatatgtaggccggataaggcgttcacgccgcatccggcaaccgatgcctgatgcgacgcggtcgcgtcttatcaggcctacaggtcgatgccgatatgtacatcgtattcggcaattaatacatagtacgattgattaaatagccttaaaaacaatgccgactataagtcggcattgttttatcagataaatcctcttgtctgtcatttaacgaaaatcataccgtgaggttaatcctaaaataaatttttaatcgtggtttatttcggaaaatacgcagagtaattactttttattttattttaacttcatgatttttaatcttatttatatataagtcaaagcttatatttgatattcattccaattgtcctaaaactccatcactaattccccgcgccgtaattcgcatgctttagttgtgtatactcgatcccgcccgaaatgttttgggtaaatctccattcattcaatgaagggaaattgttatgaaaaaagttctgtatggcatttttgccatatctgcgcttgcggcgacttctgcgtgggctgcacctgtacaggtgggcgaagcggcaggatcggcagcaacgtcggtttcggcggggagttcctccgcgaccagcgtcagcaccgtaagctcggcggtgggtgtcgcgctcgcggcaaccggtggcggtgatggttctaataccgggaccaccacaaccacgaccaccagtacccagtaataaagtatgtatccccaaaataattcgagttgcaggaaggcgacaagcgagtgagtccccgggagcatagataactatgtgaccggggtgaacgagtgcggtcaccgcatctgcagcttgaagtatgaaggggattaaccataaccacactccggtgtggttattctgcccctctggagaagagtcgtgaagcgacctgcactcattcttatctgcctgctattacaggcctgttcagccacgactaaagagctgggcaattcactatgggacagtctgttcggtacgccaggcgtacagctgacggacgatgatattcaaaatatgccctacgccagccagtacatgcagcttaatggcgggccgcagttatttgtggtgctggccttcgctgaagacggacaacaaaaatgggtcactcaggatcaggccacccttgtcacacaacatggtcgtctggtgaagactttgcttggcggcgacaacctgattgaagtgaataaccttgccgccgacccgctgattaaacccgcacaaatcattgatggtgcaacctggacgcgcacgatgggctggaccgagtaccagcaggtacgctacgccaccgcgcgctcagtcttcaaatggaatggcaccgataccgtcaaagtcggcagcgatgaaaccccggttcgcgtgctggacgaagaagtcttcactgaccaggcgcgctggcataaccgctattggatcgacagcgaagggcaaattcgccagtcggaacagtatctcggcgcggattacttcccggtgaaaaccaccctcatcaaggcggcaaaacaatgattaaacaaactattgtcgcgttgcttttgagtgcgggggcgtcatcagtcttcgcggcgggaaccgtcaaggtgttcagcaatggcagcagtgaggccaaaacgctgacgggcgcagagcatttaatcgatctggtaggccaaccgcggctggcaaacagctggtggcccggagcggtgattagcgaagagctggccacggcggctgcattgcgtcagcagcaggcgttgctgacacggctggcagaactggctgcagattccagcgccgacgatgccgccgcgattaacgccttacgccagcaaattcaggcgttgaaggtgacgggcaggcaaaaaatcaatcttgatcctgatatcgtccgcgttgccgaacgcggtaacccgccgttgcagggcaactacacgctgtgggtcggaacgccgccgtccacggtcacgttgttcgggcttatcagtcgtcctggcaagcagtcattcactccaggtcgcgacgtggcgagctatctctctgaccagagcctgctcagcggtgcggatcgcagctacgcgtgggtggtttacccggacggacgcacgcaaaaagcgccggtggcttactggaacaagcgtcacgtagagccgatgcccggcagcattatttatgttggcctcgcggactccgtctggagtgagacacctgatgcccttaacgccgacattcttcagactctgacgcagcggataccccaataatgaaaaaaagacatctgcttagcttactggcgctgggcattagcacagcttgctacggcgaaacatatcctgcgcccattggtccgtcgcaatcggatttcggtggcgtaggattattacaaacgcccaccgcgcgcatggcgcgggaaggggagctgagcctgaactatcgcgataacgatcagtaccgttattactcagcttcagtgcaactcttcccgtggctggaaacaacgctgcgctacaccgacgtgcgcacccggcagtacagcagcgtcgaagcgttctctggcgatcaaacgtataaagataaagccttcgatctcaaactgcgtttgtgggaagagagttattggctgccgcaagtggcggttggtgcgcgggatatcggcggtacggggctgtttgatgcggaatatcttgttgccagcaaagcctggtggccgttcgattttacactcggcctgggctggggatatctgggcaccagcggtaacgtgaaaaatccgctctgttcagccagtgataaatattgctatcgcgataacagctacaaacaagcgggatctatcgacggcagtcagatgttccacggcccggcctcactgtttggcggcgtggaataccagacgccctggcaaccgctgcgcctgaaactggagtatgaaggtaataattatcagcaggattttgccgggaagctggagcaaaaaagtaagtttaacgtcggggcgatttatcgcgttaccgattgggccgacgttaaccttagctatgaacgtggcaacacctttatgtttggcgtcacgctgcgcaccaactttaacgatctgcgcccgtcctacaacgataacgcccgaccgaaataccagccgcaaccgcaggatgccattttgcagcactcggtggtggcgaatcagttaacgctgttgaaatacaatgccggactggccgatccgcagatccaggcgaaaggcgatacgctgtatgtcaccggcgagcaggtgaaatatcgtgattcgcgcgaagggatcatccgtgctaatcggatcgtgatgaacgatctgcctgatgggatcaaaacgatccgcattacggaaaatcgccttaacatgccgcaggtgacgacggaaaccgatgtcgccagcctgaaaaatcatctcgccggagagccgttgggccacgaaacgaagctggcgcaaaaacgcgtcgagccagtggttccgaagtccaccgagcagggctggtatatcgacaaatcgcgctttgattttcatattgatccggtgctgaaccagtcggtcggtggcccggaaaacttttacatgtatcagctgggcgtgatgggaacggcggatttgtggctgacggaccatctgctgaccaccggcagcctgtttgctaaccttgccaacaactacgacaagtttaactacaccaatccaccgcaggactcgcacttaccgcgcgtgcgtacccatgtgcgcgagtatgtgcagaatgatgtctatgtgaataacctgcaagccaactacttccagcatctgggcaacggcttctacggtcaggtctacggaggttatctcgaaaccatgtttggcggcgtgggagcagaagtgttgtatcgcccgctggatagtaactgggcgtttggtctggatgccaactacgttaaacagcgcgactggcgtagcgcaaaagatatgatgaaattcaccgattacagcgtgaaaaccggacatctgaccgcgtactggacgccatctttcgcccaggacgtgttagtgaaagcgagcgtcgggcagtatctggctggggataaaggcggcacgctggagatcgccaaacgctttgatagcggcgtggtggtggggggctatgccacgatcacgaatgtttcgaaagaggagtacggcgaaggggacttcaccaaaggcgtgtatgtctctgtaccgctggatctcttctcgtctggcccgacacgcagccgtgcggcgattggctggacgccgctgacgcgtgacggtggtcagcaacttgggcgtaagttccagttgtatgatatgaccagcgaccgtagcgtcaatttccgctaagtcatgggaaaggtgccagttttcgcactcactggcaccttcattcttaatggcctgtcgagccatcaggaacgcagttcacccccggtttgcgatctggtgtgtaaaggcgaaaacattctgtcttcctgtccgtcgatatcggttgcaggtctggttgcctgagcgactgggccatcattgggctggagacattgctttgcggtaggtcggctttatcagcagtaccgagcggaccagcataagcaggaagaacagagactgataacatcaaagcagcaaaataaggcttcatttttaccacctttatcaggttacgtttcatttgttccagaggaacattgtcgatttttcgcgcattgctggtggcagggaatcacctgaatgggtgatttttttgggctgtgtgttttgccagatgagacattgatgggagatgcccacttaattgagctgaacaaaacatacacaaaaaatatagatctccgtcacatttttgcgttatacaggaagctcgccactgtgaaggaggtactgctatgacgtcactctctcgtccgcgcgtggagtttatctccaccattttgcagaccgtactcaatcttggcctgttgtgcctcggcctgattttggttgtcttcctcggcaaagaaacggtgcatctggctgatgtgctgttcgcgccagaacaaaccagtaaatatgagctggtagaagggctggtggtttactttctctatttcgaatttatcgcgctgattgtgaagtactttcagtccggttttcacttcccgctacgttactttgtctatattgggatcaccgccattgtgcgcttgatcatcgtcgatcataaatcgccactggatgtgttgatctactcggcagcgatcctgttactggtgatcaccctgtggttgtgtaattcgaaacggctgaagcgggagtaaaaaaaggcgctccgtggagcgccgaataacagtcacaagttgggataacgtaagttgagggtgcagcggcataacattggcagaacaacatctttaacctttcacaccacctgccgtcaggccgttgaccagccagcgttgagccagcaagaagacgatggtgatcggtaatgcagacatcacggcagcggcggcaaagtcaccccacaggtagttttgcgggttgaggtattgctgcatccccacggccagggtgtagctgtttacgtcacgcagtaatagcgacgcgaccggaacttcagtaatggcagcgataaacgacaggatgaacacaaccgccagaatcggtactgacagcggcaacaggacaaggcggaaggcctgccacggtgtcgcaccatccagcgccgccgcttcttccagcgaactgtcgatggtttcgaaataacctttgatggtccagacatgcagcgcaatcccgcccagatacgcgaaaattacgccgccgtgagtattcaggccaatgaatggaatgtactcacccagacgatcaaacaacgcatacaacgcgaccagtgaaagtactgccgggaacatctggaaaatcagcattcctttcagcagcgtcgctttgcctggaaagcgcatacgggcgaaagcgtaggcgcaggtggtggagagcgccacaatgccaatcgcggaaatcccggcgacctttaccgagttccacagccacagcagtaccgggaatggcggtggcgtaatgcgaccatcagcctgttccacgctaaaacctaacgccagtttccagtgatcccaggagatttgctccgggatcagactaccggtcgcgaagttcccctgacgcagcgagatggcgacgaccatcagcagcgggaacataattgccgcgataaaaagtagcagtagcaggtgagtaataaacaaacgtgctttttgcgatttcggttggaccattgccatttttgttatctcccttaatcaaacttcattcgcgtggctttcaggttcactatcgccagcgcgcccaccagcaggaagatcagcgtggcaattgctgctgccagaccgaagtcctgacccccgccgccttcaaaagcgatacggtaggtgtagttaacaagcaggtcggtataaccggctggcgtggtcgtgccaagacgatccgggccgccgttggttaacagttgaatcagcacgaagttgttaaagttaaaggcaaagctggcgatcatcagcggtgtcagcggtttaatcagcagcggcagcgtaatcttaaagaagttctggaatggacctgcaccatccattgctgaggcttcatacaaatcgtccggaatcgctttcagcaagcccatgcagaggatcatcatgtacggataacccagccaggtgttgacgataatcagcatcgtgcgggcggtggtcggatcgctgaaccaggcgggcttcacgccaaacagcgcgctcaacatcatgttgatttcaccgaaactctggttaaacaaccctttgaaaatcaagattgaaatgaacgatggcaccgcgtagggcagaatcagcaggacgcgatagaccgctttgccgcgcaacgcttcccactgcaccagacacgccagaaccatgccgaccgccaccgttaaaaagacagtgatcagcgagaacaccacggtccagacgaaaatggcgaggaacggtttctgaatgccttcgtcggtaaagacgcgggtaaagtttttccagccggtggtcacggtgtaaccggggcttaacttttcatcaccccagttgccatcggcggtaatggactggtaaaagccaatttggttattcggacgatatttcacgccgctctgattattcgtcaacgtgccgtcaccgtcgagtgtgtagagcggttgcgtgccagaaaactggcgcagggagctcatcatcactttgttgccatccggcagaatggcggtaatgtcactcagtgcctgacgattctgggtaatcacgcgcagattcgcgcgctcgccttcaggctgcgtggcgctttctttcaattgcagtttttgctcgccgccaaatttgaaagcgtcggagaggtaatttttgccggtttcgccgtcgctgagcgccagttgccactcatcgcccgccggataaagaccaaaattatagattttgcctgcttgccaggagcgatctagcaacacttcctgcgcacgttcaaaagtcagctggttagtgctgctgtagttggtgaaggcaatggcgatggtgcagaccagagggaagaggacgaataatcccattccagccattcccgggtaaacatagcgccaggcgtaggctttacgattggcgaaaatatacagccccgctgagctcaatatcagcgtggtaatggcgaacaggtattccccttgtgcgtacattaaaacaacaaggtaacccaccagcaggccgagcagacctaacactgaccatttcagcgcgtcgctttgccaccaatgtttctttttaatgacatccatggggttcttcctcattccaggacggataaggctttcataccttatccgacaacaactgcctgatgcgacgctgacgcgtcttatcaggcctacatacgtttcaatttcgtaggccggataaggcgttcacgccgcatccggcatttcacagcattacttggtgatacgagtctgtgcatctttcagcgcagcatccacagtctgacgaccgctggcggcgttgatcaccgcagtacgcacggcataccagaaagcggacatctgcgggatgttcggcataatttcacctttctgagcgttatccatggtggcggcaatacgtggatctttcgcaagttcatcctgataggacttcagcgctactgcacccagcggtttgtctttattgaccgcttccagaccttcgtcagtcagcagatagttttcgaggaactctttcgccagctctttgttcggactggcggcgttaatacctgcgctcagcacgccaacgaacggtttagatggttgacctttgaaggtcggcagtaccgttacaccataattcactttactggtgtcgatgttggaccatgcccacgggccgttgatagtcatcgctgtttcgcctttattaaaggcagcttctgcgatggagtaatcggtgtctgcattcatgtgtttgtttttaatcagatcaaccaggaaggttagacccgctttcgcgccagcgttatccacgcctacgtctttaatgtcgtacttgccattttcatacttgaacgcataacccccgtcagccgcaattagcggccaggtgaagtatggttcttgcaggttgaacatcagcgcgctcttacctttcgctttcagttctttatccagcgccgggatctcttcccaggtttttggcgggttcggcagcagatctttgttataaatcagtgataacgcttcgacagcgatcgggtaagcaatcagcttgccgttgtaacgtacggcatcccaggtaaacggatacagcttgtcctggaacgctttgtccggggtgatttcagccaacaggccagattgagcgtaaccaccaaagcggtcgtgcgcccagaagataatgtcagggccatcgccagttgccgcaacctgagggaatttctcttccagtttatccggatgctcaacggtgactttaattccggtatctttctcgaatttcttaccgacttcagcgagaccgttatagcctttatcgccgttaatccagattaccagtttaccttcttcgattttggcgagagccgaggcggaaaacatcatcgtcgttaatgcggataatgcgaggatgcgtgcacctgtttttattttcataatctatggtccttgttggtgaagtgctcgtgaaaacacctaaacggactctagtttctttatacggcaacctctttccatcctccttgcccctacgccccatcgttgctttgtgtgatctctgttacagaattggcggtaatgtggagatgcgcacataaaatcgccatgatttttgcaagcaacatcacgaaattccttacatgacctcggtttagttcacagaagccgcgttctcatcctcccgcctcctcccccataaaaaagccagggggtggaggatttaagccatctcctgatgacgcatagtcagcccatcatgaatgttgctgtcgatgacaggttgttacaaagggagaagggcatggcgagcgtacagctgcaaaatgtaacgaaagcctggggcgaggtcgtggtatcgaaagatatcaatctcgatatccatgaaggtgaattcgtggtgtttgtcggaccgtctggctgcggtaaatcgactttactgcgcatgattgccgggcttgagacgatcaccagcggcgacctgttcatcggtgagaaacggatgaatgacactccgcctgcagaacgcggcgttggtatggtgtttcagtcttacgcgctctatccccacctgtcagtagcagaaaacatgtcatttggcctgaaactggctggcgcgaaaaaagaagtgattaaccagcgagttaaccaggttgcggaagtgctgcaactggcgcatttgctggatcgcaaaccgaaagcgctctccggtggtcagcgtcagcgtgtggcgattggccgtacgctggtggccgagccaagcgtatttttgctcgatgaaccgctctccaacctcgatgctgcactgcgtgtgcaaatgcgtatcgaaatctcccgtctgcataaacgcctgggccgcacaatgatttacgtcacccacgatcaggtcgaagcgatgacgctggccgacaaaatcgtggtgctggacgctggtcgcgtggcgcaggttgggaaaccgctggagctgtatcactatccggcagaccgttttgtcgccggatttatcggttcgccaaagatgaacttcctgccagtaaaagtgacctccaccgcaatcgatcaagtgcaggtggagctgccgatgccaaatcgtcagcaagtctggctacctgttgaaagccgtgatgtccaggtgggagccaatatgtcgctgggtattcgcccggaacatctactgccgagtgatatcgctgacgtcatccttgagggtgaagttcaggtcgtcgagcaactcggcaacgaaacccaaatccatatccagatcccttccattcgtcaaaacctggtgtaccgccagaacgacgtggtgttggtagaagaaggtgccacattcgctatcggcctgccgccagagcgttgccatctgttccgtgaggatggcactgcatgtcgtcgactgcataaggagccgggcgtttaagcaccccacaaaacacacaaagcctgtcacaggtgatgtgaaaaaagaaaagcaatgactcaggagatagaatgatgattactctgcgcaaacttcctctggcggttgccgtcgcagcgggcgtaatgtctgctcaggcaatggctgttgatttccacggctatgcacgttccggtattggctggacaggtagcggcggcgaacaacagtgtttccagactaccggtgctcaaagtaaataccgtcttggcaacgaatgtgaaacttatgctgaattaaaattgggtcaggaagtgtggaaagagggcgataagagcttctatttcgacactaacgtggcctattccgtcgcgcaacagaatgactgggaagctaccgatccggccttccgtgaagcaaacgtgcagggtaaaaacctgatcgaatggctgccaggctccaccatctgggcaggtaagcgcttctaccaacgtcatgacgttcatatgatcgacttctactactgggatatttctggtcctggtgccggtctggaaaacatcgatgttggcttcggtaaactctctctggcagcaacccgctcctctgaagcgggtggttcttcctctttcgccagcaacaatatttatgactataccaacgaaaccgcgaacgacgttttcgatgtgcgtttagcgcagatggaaatcaacccgggcggcacattagaactgggtgtcgactacggtcgtgccaacctgcgtgataactatcgtctggttgatggcgcatcgaaagacggctggttattcactgctgaacatactcagagtgtcctgaagggttttaacaagtttgttgttcagtacgctactgactcgatgacctcgcagggtaaaggtctgtcgcagggttctggcgtcgcgtttgataacgaaaaatttgcctacaatatcaataacaacggtcacatgctgcgtatcctcgaccacggtgcgatctccatgggcgacaactgggacatgatgtacgtgggtatgtaccaggatatcaactgggataacgacaacggcaccaagtggtggaccgtcggtattcgcccgatgtacaagtggacgccaatcatgagcaccgtgatggaaatcggctacgacaacgtcgaatcccagcgcaccggcgacaagaacaatcagtacaaaattacccttgcacaacaatggcaggctggcgacagcatctggtcacgcccggctattcgtgtcttcgcaacctacgccaagtgggatgagaaatggggttatgactacaccggtagctcttcaaccaacccatactacggcaaggctgtgtcggctgatttcaacggcggtagcttcggtcgtggcgacagcgacgagtggaccttcggtgcccagatggaaatctggtggtaatagcaaaacctgggccggataaggtgcttgcgccgcatccggcaaccaatgcctgatgcgacgctgttgcgtcttatcaggcctacaactgctgccgaaagtaggccggataaggcgtttacgccgcatccggcataaaaacagctttaaggggcgaaagcccctctgattatcgggtttagcgcgctattgcctggctaccgctgagctccagattttgaggtgaaaacaatgaaaatgaataaaagtctcatcgctctctgtttatcagcagggttgctggcaagcgcacctggaatcagccttgccgatgttaactacgtaccgcaaaacaccagcgacgcgccagccattccatctgccgcgctgcaacaactcacctggacaccggtcgatcaatctaaaacccagactactcaactgtcgaccggcggccaacaactgaatgtccctggcatcagtggtccggttgctgcgtacagcgtcccggcaaacattggtgaactgacactgacgctgaccagcgaagtgaacaaacaaaccagcgtatttgcgccgaatgtgctgattcttgatcagaacatgactccatcagccttcttccccagcagttatttcacctaccaggaacccggcgtgatgagtgcagatcggctggaaggcgttatgcgcctgacaccggcgttggggcagcaaaaactttatgttctggtctttaccacggaaaaagatctccagcagacgactcaactgctcgacccggctaaagcctatgccaaaggcgtcggtaactcgatcccggatattcccgatccggttgctcgtcataccaccgatggcttactgaaactgaaagtgaaaacgaactccagctccagcgtgttggtaggaccactatttggttcttccgctccagctccggttacggtaggcaacacggcggcaccagctgtggctgcacccgctccggcaccggtgaagaaaagcgagccgatgctcaacgacacggaaagttattttaataccgcgatcaaaaacgctgtcgcgaaaggtgatgttgataaggcgttaaaactgcttgatgaagctgaacgcctggggtcgacatctgcccgttccacctttatcagcagtgtaaaaggcaaggggtaattacgccccacagtgctgattttgcaacaactggtgcgtctcctggcgcacctttttttctcctcctgtactattgttgcgtttttgttgcgcattagttcacttaatttgctttacatctcccgtaaatatttttctgcgatacaatgcctttacgttatgtaacggagagttcggcatgtcacaccccgcgttaacgcaactgcgtgcgctgcgctattttacagagatccctgccctggagccgcaactgctcgactggctgttgctggaagattccatgacaaaacgttttgaacagcagggaaaaacggtgagcgtgacgatgatccgcgaagggtttgtcgagcagaatgaaatccccgaagaactgccactgctgccgaaagagtctcgttactggttacgtgaaattttgttatgtgccgatggtgaaccgtggcttgccggtcgtaccgtcgttcctgtgtcaacgttaagcgggccggagctggcgttacaaaaattaggtaaaacgccgttaggacgctatctgttcacatcatcgacattaacccgggactttattgagataggccgtgatgccggactgtgggggcgacgttcccgcctgcgattaagcggtaaaccgctgttgctaacagaactgtttttaccggcgtcaccgttgtactaagaggaaaaaaatatggagtggagtctgacgcagaataagctgctggcgtttcatcgcttaatgcgtacggataagccaattggcgcgttactgctgctctggccaacattatgggcgttgtgggtggcgacaccgggcgttccccagctctggatcctggcggtgtttgtcgcgggcgtctggctgatgcgcgctgctggttgcgtggtgaatgattatgctgaccgcaagtttgatggtcatgttaagcgcacggcgaaccgaccacttcccagcggcgcggtaacggagaaagaggcgcgcgcgctgtttgtagtgctggtactgatttcatttttactggtgctgacgctgaatacgatgactattctgttgtcgattgccgcgctggcgctggcgtgggtatacccgtttatgaagcggtatacccatctaccgcaagtggtgctgggcgcggcgtttggctggtcgattccaatggcttttgccgctgtgagtgagtcggtgccattgagttgctggttaatgttcctcgccaatattctctgggcggtggcttacgacacgcagtatgcgatggttgaccgcgatgatgatgtgaagattggcattaaatccaccgcaatcctgttcggccaatacgataaattgattattggtattttgcagattggcgtactagcgctgatggcgatcatcggtgagttaaatggcttaggctggggatattactggtcaattctggtagctggcgcgctgtttgtttatcaacaaaaactgattgccaaccgcgagcgtgaagcctgctttaaagcatttatgaataataactatgttggtctggtactgtttttagggctggcaatgagttactggcatttctgatgatgtaaaaaagccggatgatcatccggctttcttctgggttgcctgatgcgctgcgcttctcaggcctacacaacatatcgcaatttattgaatttgcagatcatggtaggccgaataaggcgtttgcgtcgcatccggcaattctcactgattacccttcgccctgcgtcgcactctcaatcgtcaaacgcacgtctgatgtaatcaactccgccagcaactgatacaccttcatcgtttctgccggttcggcgtcgccgctatcgctgatatacccttcatcacgcagtgtcagcaccagagaactgaacaccgccttgtcgaagaactccggcgcgttgataccgtgcagcacggagagacgttgcgcgacggtgcggctctctttctccagcgtaccgcggttgatcgacgggttggcactcaacagccagaaggtgatggcataacgttgcagcgtttcgcgcgcgcctgcggccagcagctgtagcgtgcgagaatgcgccgggttgatatgcaactcatcatcttgcagggtaatcagcccctgacgttgcatctcatttgccagcgcatcaataacgtccggtaactcgtcgcgatcccagcgcaggaacagctccgctttcagcattgggtaaagcacattgacgtgctccatcaatacgtcgcgggagatgtggcgatgctgggtgacaattgccgccatcagcgaaggcagcaccaacatatgtgcaatgttgttgcgatagtaggtcatcagcaccgcttgctcgcgcggcagaatgatgatgtcgccgatagtgtctttctcaacttcaaacttgttcatttgcagcgcgtgatcgataagctcgctggcgctggctgaaggaacggtagagtccgtggagtaaggtacgttgcgcatcagatccaggtagcagttgagttgctcggttaactgctcgcgggtgagtgagcgctgacgtgacgccagaagcgcagtacagcacaggttcatggcgtttgccgcgcctgcgttgttaatgcgtaccatcagatcggcagcaatattattgaccgtcggcgttaaccaggccggacgcaccgcttcgatgggatcgatagattcacgccagtctggtacgtgctggttaaggtaggtcatcaacggcattggttcaccgaagttgacgtaaccctgaccgagattacgcagcttgcttaaaccacgcagcatctgcggcaggctctctttctctttcgtcgcaccgcgcagttctttggcgtaagtacccacttccatgacgtgctcataaccgatatagatcggaatcagcgtaatcggacgagtgccgccacgcagcatcgcctgaatggtcatcgacagcgtaccggttttcggatccagcaaacgccccgtacgggaacgaccgccttccacgaaatactcgacggaataaccacggctgaacagttcgccgagatactcacggaaaacggtggaataaagtttattgcctttaaacgtacggcgaataaagaacgcccccagacggcggaaaatcggcccggccggccagaagttcaggttgatcccggcggcgatatgcggcggcaccagcccctggtgatacagcacgtaagaaagcagcaggtagtccatgtgactgcggtggcaaggcacatacactagctcatggccgtcgtgggccagctggcgaacgcgctcggcgttatggacgttgataccctggtaaagtcggttccaggtgaagcccagaatgcggtcagtcaggcggatcatctcgtaagagaaattcgccgcaatctcttccatcagcgcaatcgcgttctgctgcgctttttcatgggagatttttttgctgcgtgcttcatcttctaccgctttcgcaatggcgcgggaggcgagcagcttattaaacagatcctgacgagcaggcagacgtggacccacggcagccagacgttgacgggcaaagtgcatacgtgctacgcgcgccagtttctgagcgatagttttatccgtgccgtgttcatccgccatacggcgcagcgaaactgacggcgagaaacgcacaaaactgtcgcgaccgagccacagtacagcgaaaaatttctgtacgccgttaagcatacgcagcggcgggttcacttcgcctttttcacgccccggcgcgcgaccaaacatcaccgatacaggcaccatctgcacatccagatttgggttgctgcggtgcaaatcgagatagtcgtggaacagcttaatagactcttctttcggcgtgtaataggtgaacacacgcggcccgccgtgaatgaacacatagcgcggcagtagcgtgccgtcgatttccagcggctctaacgggtcaggcaggtcatgtgccagacactgggcgcgcaacgtcagcaagtcagctttcgagttgtacggcaaaacgtacataattggacgagaggtatccagccccagttccggggcaggatccgccggaatagacttgctttttaccaggatgcttaatggtaaattcagtaatttgtagtaaattcgtggccagccggacataaacgatgtaaagcctctggttaataatgcaaatgcgcggcaaggatagcagaaagtcatgggaaattctgtggtatccgctcatgtttcgcgcggcgttactcaaacccgaatcatcggatttaacggtacactgatattgacgctcataatgtaaaaaggttctttcaatggccaataataccactggattcacccgaattatcaaagctgctggctattcctggaaaggtttacgcgctgcatggatcaacgaagcggcattccgtcaggaaggtgtagcggtattgttagcggtggttatcgcctgctggctggatgtggacgcgattacccgcgtgctgcttatcagctccgtgatgctggtgatgattgtggaaattctcaatagcgccatcgaagctgtggttgaccgaattggctctgaataccatgagctttccggacgcgctaaagatatgggatctgccgcagtgctgattgccattatcgtcgccgtgattacctggtgcatcctgttatggtcgcattttggataacccttccagatttcgataaatctctggtttattgtgcagtttatggttccaaaatcgccttttgctgtatatactcacagcataactgtatatacacccagggggcggaatgaaagcgttaacggccaggcaacaagaggtgtttgatctcatccgtgatcacatcagccagacaggtatgccgccgacgcgtgcggaaatcgcgcagcgtttggggttccgttccccaaacgcggctgaagaacatctgaaggcgctggcacgcaaaggcgttattgaaattgtttccggcgcatcacgcgggattcgtttattgcaggaagaggaagaagggttgccgctggtaggtcgtgtggctgccggtgaaccgcttctggcgcaacagcatattgaaggtcattatcaggtcgatccttccttgttcaagccgaatgctgatttcctgctgcgtgtcagcgggatgtcgatgaaagatatcggcattatggatggcgatttgctggcagtgcataaaactcaggatgtacgtaacggtcaggtcgttgtcgcacgtattgatgacgaagttaccgttaaacgcctgaaaaaacagggcaataaagtcgaactgttgccagaaaacagcgagtttaaaccaattgtcgttgaccttcgtcagcagagcttcaccattgaggggctggcggttggggttattcgcaacggcgactggctgtaacatatctctgagaccgcgatgccgcctggcgtcgcggtttgtttttcatctctcttcatcaggcttgtctgcatggcattcctcacttcatctgataaagcactctggcatctcgccttacccatgattttctccaatatcaccgttccgttgctgggactggtcgatacggcggtaattggtcatcttgatagtccggtttatttgggcggcgtggcggttggtgcaacggcgaccagctttctctttatgttgttgctgtttttacgcatgagcaccaccgggctgactgcgcaggcttatggtgccaaaaatcctcaggcactagcccgtgcgctggtgcaaccgttgctgttggcgttgggggccggggcgttaattgcgctgctgcgtacgccgattatcgatctggcgctgcatattgttggcggtagtgaagcagtcctggaacaggcgcgacgctttcttgaaatccgctggttaagcgcaccggcgtcgctggcgaatctggtattacttggttggttactcggcgtgcaatatgcccgtgcgccagtaattttgttagtggtcggcaatatcctcaacattgtgctggatgtctggctggtgatggggctgcatatgaacgtgcagggcgcggctctggcgacggttattgcggaatatgcaacattgctgattggtctgctaatggtgcgtaaaattctcaaactacgcggaatctccggcgaaatgctgaaaacagcctggcgaggaaacttccgtcacttgctggcgcttaaccgcgatatcatgctgcgctcgctgttgctgcaactctgtttcggcgcgatcactgtacttggcgcgcgactggggagtgacattatcgctgttaacgcggttctgatgacgctactcacctttaccgcctatgcgctggatggttttgcctacgcggttgaagcacattccggtcaggcatacggtgcgcgcgacggtagtcaattgctggatgtctggcgggcagcgtgccgccagtcggggatcgtagcgttactgttttcggtggtttatttgctggcaggggaacacatcattgcgttgctgacgtcgttaacccagattcagcagctggctgaccgctatcttatctggcaggtgattttgccgttggtcggcgtctggtgttatctgctggacggcatgtttataggcgcaacgcgtgccgccgaaatgcgtaacagtatggcggtggccgccgcaggttttgcgctgacgctccttacgctgccgtggctggggaatcatggtttgtggctggcgttaaccgtctttctggcgttacgtgggctttctctggcggctatctggcggcgtcactggcgtaacgatacctggtttgtcgcaacgtgacggttaaaaattctgaataaataatcctaagccaaattgctgactacacttaatctcacgttcagaagaaaagtgaacgtactctcattcacaacctaacgatgaggtcttgattatgaataaagatgaagccggcggtaactggaaacagtttaaaggtaaagtgaaagagcaatggggcaaactgaccgatgatgatatgacgatcattgaaggaaaacgtgatcagttagtgggtaaaatccaggaacgctacggttatcagaaagatcaggcagaaaaagaggttgatagttgggaaaaacgccatgattaccgctggtaattaatccctcctgcccgacatgtacaaggatgtacacccttttagcgaggtttctttttcacctgaatagagtggtcatgatggcactgttcaggatgacgacacgcttctacttctacacatgctgaacataatccatgtgcttcaataacattatgccgcagggcaaaacccatttttgccgccagcgtatgcatgatgtcttccacgccttcagcacattcttctttcaccgcgccgcagcgatcgcaaataaacatggctgaagtatgggtgggctgatcgaacagatgacagagcacataactgttggtggattccaccttatgcacaaaaccttgttcaagcagaaactccagcgcgcgataaaccgttggcggcttggcttgcggttcagcttcgcgcagcaaatcaagcagatcataagcgctgatagcgccatcctgcagactcatcaggcgcaacacttcgaggcgctgtggggtcaggcgcacattacgctgtgcgcagattttttcagcctgcgctaataactcctgcgttgtggtcttttccattgggcacctcgacagtggggttaagaatgtccttactttatcatagttctcacttaaacgccgagaacagggtgtcatggctgtcacattgcctgatcgcatattcgttatgctatagtagcgcccccaatttaccagatgcttaaaaagtcgccatgccagcagaatcacacactgtttatcccgcttaccgtttctcgattgccccgatgcttgactggacggacagacattgccgttatttcctgcgtctgctttcccgcaatacgttgctgtataccgaaatggtgaccacaggggcgattattcacggtaaaggtgattacctggcgtacagtgaagaagaacatccggtagcgttgcaactcgggggtagcgatccggcggcgctggcacagtgtgcgaagctggcagaagcgcgcggatatgatgagatcaacctgaatgtcggctgcccgtctgaccgggtgcagaacggcatgtttggtgcgtgtctgatgggtaatgcgcagctggttgccgactgcgtgaaagcgatgcgcgatgtggtgtcgattccggtgacggtgaaaacgcgtattggcatcgatgatcaggacagctatgaatttctctgcgatttcatcaacaccgtttccggcaaaggtgagtgtgagatgttcatcatccacgcacgtaaagcctggctttctgggttaagtccgaaagaaaaccgtgagatcccgccgctcgattatccgcgtgtgtatcaactgaagcgtgactttccgcatctgacgatgtcgattaacggtggtatcaagtcgctggaagaagctaaagcgcatttgcaacatatggatggcgtgatggtcgggcgcgaggcgtatcagaatccggggattctggcggcggtagaccgagagatttttggttcctcggataccgatgccgatccggtggcggtagtgcgcgccatgtatccgtacattgagcgtgaactcagccagggtacgtatctcggccatattacccggcatatgctgggcttgttccagggtattcctggcgcgcggcagtggcggcgttatttaagtgaaaatgcccataaagcgggtgcagacattaatgtgctggaacacgcgctcaaactggtggcggataagcgttaacttttcaccaaaaagtagtcaaattcaccacgccctgcgcaccgtcgcggggtgttttgctgttaaatcaacagattatttttggcatgattcttgtaatgccagcaagagatttcatatttgggagagcatcatgctggaactactttttgtaattggcttttttgtcatgctgatggtcaccggtgtttcgttgctgggtattatcgccgcgctgattgtggcgacggcctttatgttcctcggcggtatgctggcattgatgattaagttgctgccgtggctgctgttggcggttgcggtggtgtgggtgatcagggcaattaaagcaccaaaagtgccgaaatatcagcgttatgaccgctggcgttactaagggattgtgcggatgatcacaacctaaggttttatccttagaacaaaataggaattgataatcaaatctgtcactattgcgcgtcaaacaaattcatcgagctgtaccctacatacagccgaactataaaagaaagggcttcccaggtggaagcccaatttcttttatggaatcaacaggctggaaccctgcgtcgcccggctttccagaatctcatgcgcacgccgcgcatccttcagcggatatttctgctgctcggcgacatcgaccttaatcacaccgctggcaatcaaagagaacagttcattactggcctcggttaattcctcccgcgtggtgatatagccttgcagggaagggcgtgtcacatacaacgagcctttctgattgagaatgcctaagttcacaccggtaaccgcacctgatgagttgccaaaactcaccattaagccgcggcgttgcaggcaatccagcgaccgttcccaggtgtctctgcccactgaatcgtacaccacgcgcactttcttaccaccggtgatctctttcaatcgctcgaccaggttttcttcgcgatagttaataacctgccatgctccggcttttaaggcgctttgcgctttttgcgccgttcctacggtgccgataagtttcgcgccaagggcttttgcccactggcaggcaatcaagccaacgccgccagccgctgcgtggaacaggaattgttcatcgggtttaatttcataggttttgcgcagcagataataaaccgttaagcctttcaggaaggatgccgcagcttgctcaaaagaaattgccgcaggcagaatcgccgctttatccgcattaatgttatgcacagagctgtaagcgcctaatgccgattgtgcatagactacgcgatcgcctgccttaatatgctttacaccactgccgactttactcacgatgcctgccgcttcggtgcctaatccgctgggtagcgatggtggcgggtaaaggccgctgcggatatacgtgtcgataaaattgatgccgatggctttattttcgacctggatttcattctccgccggatcggcaggagtgaactctacggcttgaagtacttccgggccaccgtgcttgtgaaattcaattcgtgttgccatttaaactcctttactgagcgacatatctgttttaagcctaacagtagtcgccaggccgcgcggggattttttccgggctgcggtcacaacccggaatatctctgatcagtattgaaacggcgtcgccgcaatccagttttgccactggcgctcaaagttggttagcgttaatacgccccgttcacggcacgggcgagtccaggtttggtaatcattagcttcccgacaaacacaaatcatatattgcctggcatcctgattttctggccgaaaacgccaggccaggagtggcccacctggtgtttgcggtgcaataccggcttcgccatcatagatagccctggcaccacgactcccaccaccgttttcgacataacattgtaaagaacgcagtacagccagcgccagttgcgcactttgccgccactggaaagattgtgccaggctgttttcatcgcattgaataccttcccggcgaatatcttcacaaagtgttgccagggtttgcgcggcagtgttgatcccctgtgtatgacacaaaattgcggcatggtggctcatggtattttgtatcgtttctcgcacgtcgtcacgtagcagcccctgattcaggtgctgttgcgcctcattaatcgtactgagaatttgttgcctctcgagaggccggtcctggcttttctgatgagcaatatgtaatgcacagcggcgggcgaaaacttgcccggcattgagcgctgctccacctgggcgcgtgacaccatgtgttccggcattttctccggcagcataacaaccagttagcgatgtacgtgcccaaatatcaacttcaattccgccattaagatgttgattatttagcgtaaacttgagcggtgaggctgtgagatcatgaccgtgcatctgatacaaacgaatagccagaggattcatctgtgttaatctcgccagcggttgtgccagcagggcgtgattttgttgcagatagtcgatgacatcatcatccagctcccgcaggttaaatagtgttccgtccgctgcgggttctggttcccgtagaaaatcgagaaaaacatcgcgccctttttgagtctcttcataaactgcgacatccagcaagctggagccatattccagcattcgttccgcgtgaaacggccactggtaacctttgcgaaatatcgcggaggccagcatacgagtcgtggggtaataagttgccagaaaattatactgacgcccggagtggtcctgcgaatagatgcgcggcatcgcctgcatgtaagtaccggaaagattccacggaaactggctgcgcggtgtaccgataccaaactgactttccgtaagattaaccagagttatccctgcttccagcgccatgcccaacgcactaaaacagttcaccggataaacactgtcacgataaagttcaccaggcccgcccgtggctaaaaccagatgctgacagcgaatcactaccattctccagggattatcccgacaggctttatcgatggcgatcaccccctcgactcgtcgattttctccttcaccactggtcaggatacgaatcgccgttgtgtgatcgcaaagaggaatattaaggcgcattgcctcctgggccagcaccttcaccatcaggcgcgatgttcgaggaccgcagctagtggcacggccaaattcatcgtgatcggtttgataacgcaacgttgcgccaaagagatcttcaggcaaatccagacccagatatttcagtacttcacaggtgttcaccgatccgagcgcctcaacatatgcggtgtcatgatccatcgcaccacctgccgccagggtgttacttaatgtcagaaaatggtcaccatttgcacgcgtattcgcggtgtgaagcgtttgtttatcagaaccagaacaggcggaagttccccagaaggctttgctggaggctaccattacatcgacattttgccgtttcagctcgacggcagctcgccatcctgccgcgccactgcccagaaccagcgtgttgcagcggtactcaggtaaaatggtaccgttaaggtcgatactaccgctgacttgagccagcggtgcgtaatggggcattttcacgtcagtcagggaatcgataatagattcagagacattatgcgtcatggtaggtgcccgtagtctggttatgttgggaaacgctgatcgtttcagcgtcggcaagatcatcaagatcacgatcgcgtgtttctggagcaaagaaagtcgcaataatcgtaccaacggtcagcagactaaggtaaatagcgattggcatccaggcagcaataccactgggatcgttagtgtggatcacccaggaaatgattgcagaaccaaccagtggcgcgatccctccggcaataacggcagaaacttcccttgccagtgcgacgccaatataacgatggcgagcaccaaagagttcaggcagaaaagcaccttgtgcaccaaacataccccaggctccaatccctaaggccagagaaagagagacaatagtgacaggaacattaccgtggctgaaagaccaccacaccggaaaggtaatcaacaactgaaaaatcgccagactacgatagacaagaaccctgccgaagcgatcggtcagccaaccggcaataggcaccataattgcaccgactactaccgcagacatcaggcatagcgtaccaactgatttgtccagcccaaccacaccaacgatataactgatcgctaaagcctgataaatcgacgagccgccgttttctgccagacgtaagccaatcccgacgaagacattacggcgtgatgttttcagcaaatttcgtaagggtgattctgtaacttgttgacgagcttcgagttttgcgaatgatggcgattctttaagatgcagtcgaatataaatagccaccgcgataatcaccacgctggagaggaagggcaagcgccaccaccaggtttcggcaagatttgtcacattatgcagcaggatgaagtaaacggcagatgccataaacgtaccaatctggattccgaggaacggcagcgcggcgtaataaccccgtttgccgtcaggagcatattcggtcatcagtacggcggctcccgcctgttcagccccagcaccaagcccttgcagcaggcgtaatgcaataagcataattggcgcccagattcccgctgtttcgtaagtgggtaataccccgatcaacgtgctggcgattcccattaacaacaccgttgctaacaggacgaacttacggcccaaacgatcacctaatgagccgaagagaattccgcctacaggtctgacggcaaatccgagaaagtaggtgccaaaactggcgatcagcgccattcccggttcctgattaggaaaaaagagtggaccaaaaataatggcggatgccaggctgtaaagtgcgaaatcgtagtattccagtgcgctgccgagagagcaggtccacgccgcgcgacgcagatctgccgatgaaacattcgctttctctgctggttgtgaaggttgcatgatgtgtctcctttcagacggataaaagaaatccgcctaaaatcaatgggattcttgcgttattattaaaatccaaaatgaaatgctaagttatcgagcactaaagtgcggttgacgcttctcagtaaatgcctgactgccttcatgagcatcttcagtcgtggcggaaaaagcgccagccagtgcttcaagcgtcgaggccacagcaataccttctccggcatcaataacctgcttggcgatctgcactgcaacgggagcacgctgggcgatacgttgtgccagttgcagtccggcgtcgtgtaacgtctccctggcgacaacgcgattcaccagcccgcaggacagtgcccgctgtgcatccagtggttcaccggtaaataccagttctttcaccagtgagcgcccaagcagtgccgtcagccgctgcgttcctgaccagccaggcactgtcgccagcccggtttctggtagtgccatttgtgcttcggcgctacaaatacggatatcggcggtagcagccagttccagaccaccgccataagccaggccgtgcaacagggcgattacgggctgtggcagttgtgccagagcatcaaatgcctgatgaccgcggcggatccagttgcgccacatatcgagtgcagaaagagaggtccagcgatgaatatccgcgccgacacaaaacgctttttcactggcactggtcagcagtactacgcggatctccgaatcagtttccaacgtgtggcaatgcgccagcagttgttcgagcatctctggggttaatgcgttgagtttcgccgggcgattaatcaccaaagtggcaatgaaaccgttgcgctggaggtcaatggtgccgttattcatggtgacgtccttgttgaaaatagtggggattcattagtttgagatcgtctgccagacggagtggggcatcgctttgggcgagaatgtcgcgttcaggatcaatacctggggcaatttccgtgaccagtagtccgtctggggttaattccagcacgcagcgttcagtgatgtactgcacttgttgcccgagtcttattgcgcgtttgccggagaacgtcacgtgggcgacgtcctgtaccagttttttggctttgccttctttaatgatacgcagctgaccttcttccagttgcagttgggcaccggcattgaaaaagccagagaaaataatgcgcttcgcatgtgaggtgatatcaataaatccaccgcatccggcagtgacatgtggacgagcggggagatgtgagacgttcactgagccatctgcgccgatttgtaaaaacgacatcagagtgagatcaaagccaccgccctggaaataggtgaactgctggggagagggcaaaaatgcttctgcattagaggcacaaccgaactgaaattccagcagtggaactccgccaatcgcgccctgttccagcagccaggtgacgtcaccgtggcgaccttgttccagtagaatgcgtggtacgttggcagaaataccaaagccaatatttaccgcatctccactttgtagttcttgcgcgactcgctgggcaataactcgcgccgggccatgttccatataacgaaaggctgatagcggacgactgatttcgccggaaatggcaggttcatattgcgtttgtgtcgtttgtgtttgttccggcgcaatcacgatgtaatccaccagtacacccggaatacgcacctcttttggtttcagacttccggcggcaacctgtcgttttacttgcgcaattatgatgccaccattattgcgaacggcagtagcctgttccagtggccccagataagccccttcatgttcataagtcaggttgccgcgttcatcggcagtggtagcgcgaatgatcgccacctgcggcacgatactggggaaaaacagccagtcgtcgttagcaaatcgaacacgttcaaccagagattgttgcgccgctttttcattcattgcaccgccctgcaacaggggatccacataggtatccatgcctgtttgtgtcagcacgccaggacgatgagccgccgcttcccggtgcatatcaaataagatcccggaaggcagattccaggcggggatcgcgttgtcattgatcatttgccagattaacggaggtgccattgatgatggaccggaggggtaggagccagcgatcacttttgccagtaagcccggttgcgccagatgatcgatgccttttacgccatacatatcaccagcggcgatagggtggatggaggtgatgttttgcggatgtccggcacgttgaaagcgttcacctattgctgccagcaccgcatccggacaccccattccactggaggaggagacggtgacaactgcgccatcaacaatcaaatctgcagcttccggtgcagtgatcgtgcgtacagagcacataataatttccttgtttcgatataaaaataattaaaaatatgcatttaaaacaatatgataattttcataaattaattggaacgatctagtttatgcgtaatttgtacgattagggtgtaaaaaacacaacaagggaagtgcgaatctgtgatcgaaacgacgatctcctgcgatcccttgcgttaacggatcgcatgagtaaaaggagattatgataaagtaattgccttgatcttatggggggttggagcaggcatggcgaagtcggatacaggaagaaagcgggtaacattaaccgatgttgcgcgtgcggctggcgtttcgaaatcgaccgtatcgctggttctcaacgacagttcacttatcaaaaaagagactcaacaaaaagtccagcaagccattgaacaattaggctatgtctataaccgttttgctgccaatctgcgttcgcaaaaatcgctaactatcggcgtagtcattgacgatttgataaatcctttcttcgctgaatttactatgggtcttgagatgacgctggcggagcacggttttatcaccgtgatgtccaatacctcccagcgtagtgaccggcaaaaacaggtgcttgataccttgctggaacaccacgtcgcgggcattgtcctctgtccagtgaacagtacctcagaagccgatttacagcgttatgccaacagttccacacccttattaatcacgatgcgtcctctggattggcaacaattgcccgtcgattacgttggcgtggacagccacgcaggtgtacgggaagcgacggaatatctcattcaacaagggcacagagatatcgtgtttattggtggtcttacgcaccatatgcgttatcagggataccttgaggcgatgaatcaccatggtttacagccgtggagtactgatgctttttcgctgcgtgctgaaccgactcaggccaacggctaccagttgatgcaacagctgttggatatgccttcgccacccacagcggtgatttgttataacgatttaatggcttttggcgcggagtcggcactaggcgaaagaggattatttgccggggaagatatttcgttgattggtaatgatggcgtggcggcttgtgcttacagtaacccgccgttaaccacaattgcggtagaaccattggctctggggaaacaggcggcgcagcaaattttacggcgtattgcgcaaccagacgcaccgctcagccattacatctatcgcccgaccctgcaaattcgcgcttccaccggaaagcgggggcgttaaatgctgtagcgagaaactgtttctcgctatactctcttgtcccccattcaacagcaggtaacaccattcgttatggcaggcaatagacctttcaacaaacaacagactgataaccgcgaacgcgatccacaagttgccgggctaaaagtgcctccgcactcgatcgaagcggagcagtcggtgttgggcggtttaatgctggataacgaacgctgggatgatgtagccgagcgtgtggtggcagacgatttttacacccgcccacaccgtcatatctttactgaaatggcgcgtttgcaggaaagcggtagtcctatcgatctgattacccttgcggaatcgctggaacgccaggggcaactcgatagcgtcggtggttttgcttatctggcagagctgtcaaaaaatacgccaagtgcggcgaacatcagtgcatatgcggatatcgtgcgcgaacgtgccgttgttcgtgagatgatctccgttgctaacgagattgccgaagctggttttgatccacaagggcgtaccagtgaagatctgctcgaccttgctgaatcccgcgtctttaaaattgccgaaagtcgtgcaaacaaagacgaagggccgaagaacatcgccgatgtgctcgacgcaaccgtggcgcgtattgagcagttgtttcagcagccacacgatggcgttaccggggtaaataccggttatgacgatctcaacaaaaaaaccgctggcttgcagccgtcggatttgatcatcgtcgccgcgcgtccgtcgatgggtaaaacaacatttgcgatgaatctcgtcgaaaacgcagcgatgttgcaggataaaccggtgcttatcttttcgctggagatgccatcagaacagattatgatgcgttctctggcgtcgctgtcgcgcgttgaccagactaaaatccgtaccgggcagctcgatgatgaagactgggcacgcatttccggcaccatgggtattttgctcgaaaaacgcaatatctatatcgatgattcctccggcttgacgccaacggaggtgcgttcccgcgcacgccgtattgcccgtgaacacggcggcatcgggcttatcatgatcgactacctgcaactgatgcgcgtaccggcgctttccgataaccgtacgctggaaattgcagaaatctcccgctcgctgaaagcactggcgaaagaactgaacgtgccggtggtggcgctgtcccagttgaaccgttctctggaacaacgtgccgacaaacgcccggtcaactccgacctgcgtgaatctggctctatcgagcaggatgcggacttgatcatgtttatctatcgtgatgaggtgtatcacgaaaacagtgatttaaaaggcatcgcggaaattattatcggtaaacaacgtaacggcccaatcgggacggtacgcctgacctttaacggtcaatggtcgcgcttcgacaactatgcggggccgcagtacgacgacgaataatcactttggggccagctaaacactggtcccaaaattattctgccgggctttcaatccctttttttagccactctttaaggctcagaaccgagttatcttcgtcttcgtggaatatgatattgtcgatctgccaacagccatcatcagcggaacgcgccattagcgcttcgtcctgccaggcctttttatcatcaacgctaaaatgaaaatggagggtgacagtgacgttgttatcaccaggtttaaacgatgacggtagcgtcacgccatcaaatttctcatagtaactatccgaaggataagacgtgaaaataatcccgtcaccaaaagtaggtttggccgtgggatcaatggcgtagtcgcgtttatttctgtcatacgcgccaacaataagttgataaagcgagggggtgaggtaattctgaaaaaatgccagctggtctttttcactcttaaagccggtatcagaaaaaacataggttgaataaaacttatctgcgacaccgtcaggtgtctgcaccgggcaagcccccgtcgcggcaggtgttatacctgcgattagcagaaaaaagaaaacaaattttatctttgtcatggctgaaaatccgatatcatcttgccgtttataaacccatccctggatgtggaatagcatactccggtcatatctgtttagcgaggttttgcactggtgggcagaacctgaaaaaaaggaatacaaatgcaagcggcaactgttttgattaaccgccgcgctctgcgacacaacctgcaacgtctgcgtgaactggcccccgccagtaaactggttgcggtggtgaaagcgaacgcctacggtcacggtctgattgagaccgcgcgaacgctccccgatgctgacgcctttggcgttgcccgtctcgaagaagccctacggctgcgggcggggggtatcacgcgacctattttgttactggaaggtttttttgaagcagacgatttgccgacgatctccgctgaacatctgcataccgcagtccacaatgaagagcagcttgtcgccctcgaaaacgctgaacttaaagagcctgtcaccgtctggatgaagctcgataccggaatgcaccgtttgggcgtattgccggaacaggccgaggcgttttatcagcgtctgagccagtgtaaaaatgtccgccagccggtgaacattgttagtcacttcgcccgtgccgatgaaccgcaaagcggcgcgactgaaaagcagctcgatatcttcaacaccttttgtgaaggtaaaccggggcaacgctcaattgcggcatcaggcggcattttgttatggccgcagtcgcattttgactgggcgcgtccggggatcattctttacggtgtctcgccgctggaagatggcacgacaggggctgattttggctgtcagccagtcatgtctttaacctccagcctgattgccgtgcgtgagcataaagccggagagcctgtcggttatggtggaacctgggtaagcgaacgtgatactcgtcttggcgtagtcgcgatgggctatggcgatggttatccgcgcgccgcgccgtccggtacgccagtgctggtgaacggtcgcgaagtgccgattgtcgggcgagtcgcgatggatatgatctgcgtagacttaggtccacaggcgcaggacaaagccggggacccggtcattttatggggcgaaggtttgcccgtagaacgtatcgctgaaatgacgaaagtaagcgcttacgaacttattacgcgcctgacttcaagagtcgcgatgaaatacgtggattaatattcgtctccagggagggacaatgtcttattcagaaatcgccgcgtgtctggcatacgcggtttccgtctggctggctgccagaaacaatgtgcatacatggtggatcggcataattggcagcatattgtacggctgggttttttggtccgtgcaactctatgccgacgttacgctccagttattcttcatcgcgaccagcatcactggctggatccactggctgaaaggtcagggtggcgacatcttgccggtgcgccgaacgcaagccagtcactttttccttttgttgctctgtgctgtcgtcgtggcaggcggttacggctttttactccacacctttaccaatgcctgggcaccctggctggattcgttgattttgacctttagcgttctggcacaattcatgttgatgggaagacgtatcgaaaactggttcgtctggttagcggtgaataccctggcagtgccactgtatatgacgcgcggtttaaacctgaccgctggcttatatttcctgttctggattaacgcctggcatggtttgtatcaatggcgcaaagagttgcaaacatcatgaagccttttgcaacgggcctggtggttggtaaattcgcgcctttgcattgtggtcatgaaaagttgatcaataccgcactggcgcaatgtgaagaactgttcatcatcagttattccgtgccggaaatgcctgactgtgaacctgaaaagcgcctgacgtggctgcaagtgcgcttcccgcaagcgacgattttggtactgacgccagagcttgttgcgcgttataacttacctgccataccgcataacgatgccgatgccgacatccaccgtcattatgtggcgacgctgtgcctgcagatattacgctgtcgtccacatgctgtatttactgcagaagactatggcgatggctttgctaacgtgctggcgcggcgttttgcccaacccgttgaacacgttcgaatggcgcgcccagttggcgatgaagcgccttcgggaacgcttattcgttccgatgttcaccgctatcgctacatgttggcgaatgatgtttattacagtttcgttcgccgtatctgtctgcttggtggcgaatctaccggtaaaagcacgctttcaaaagcgctggcggatgggcttgatacggtgtatgtcgctgaatttggccgcgactattgggaagaaaaaaacggaatcttaaccgcggatgatttgttgcatatcgcctgcgaacaggtacgccgggaacaacaagcagaagctaatcactatcttatatgtgacacgtcgccactcacgaccttgttctatgcccttgatcaatatggtcatgctccgcaagaacttcatcaactggcggagcgggaatactctctggtggtgctttgcggcgcagaatttcccttcgtgcaggatggtacccggcaaggagaggtatttcgcgcacggcaacaggtgtggtatgaacaggaattgtcgcgcaggaacattccttatctttcggtttcggggccactgcaagagcgagtggagcaaattcttcgccaacttcccgactgactttgaacatcctctcgatcttcgcctacttccggtttattgtgttttaaccaccagcccgtaaacctggagaaccatcgcgtgtttcaaaaagttgacgcctacgctggcgacccgattcttacgcttatggagcgttttaaagaagaccctcgcagcgacaaagtgaatttaagtatcggtctgtactacaacgaagacggaattattccacaactgaaagccgtggcggatgcggaagcgcgcctgaatgcgcagcctcatggtgcttcgctttatttaccgatggaagggcttaacagctatcgccatgccattgcgccgctgctgtttggtgcggaccatccggtactgcaacaacagcgcgtagcaaccattcaaacccttggcggctcaggggcattgaaagtgggtgcagatttcctgaaacgctacttcccggaatcaggcgtctgggtcagcgatcctacctgggaaaaccacgtagcaatattcgccggggctggattcgaagtgagcacttacccctggtatgacgaagcgactaacggcgtgcgctttaatgacctgttggcgacgctgaaaacattacctgcccgcagtattgtgttgctgcatccatgttgccacaacccaacgggtgccgatctcactaatgaccagtgggattccgtgattgaaattctcaaagcccgcgagcttattccattcctcgatattgcctatcaaggatttggtgccggtatggaagaggatgcctacgccattcgcgccattgccagcgctggattacccgctctggtgagcaattcgttctcgaaaattttctccctttacggcgagcgcgtcggcggactttctgttctgtgtgaagatgccgaagccgcaggccgcgtactggggcaattgaaagcaaccgttcgccgcaactactccagcccgccgaattttggtgcgaaggtggtggctgcggtgctgaatgacgaggcattgaaagccagctggctggcggaagtagaagagatgcgaactcgcattctggcaatgcgtcaggaactggtgaaggtattgagcacagagatgccagagcgcaatttcgattatctgcttaatcagcgcggcatgttcagttataccggtttaagaaccgctcaggttgaccgactacgtgaagaatttggtgtctatctcatcgccagcggtcgcatgtgtgtcgccgggcttaacgcgcaaaatgtgcatcgcgtggcaaaggcgtttgctgcggtgatgtgattttaatcaacaggcggatctctccgcctgttcctgactccagccatcccctactattctgtcccttttttcgcccacttttacatcatctcttttctataagtttttgaaaattagtgtttttaactgttggtacggattgtgcagtaatgcggctgtctatgaccatcaggagaaaaacatggagaacatgacctcgcccggcacgctgcttagtggagataacgcgacctggcttgaagagtactaccagacctggttgcgtacgccggaacaactcccggaagactggcggcgtttttttctttcacctgaactgactgtccaaagcgtatccggtgataacaacgtcagcggtgcgacgttaaaaaaacaggctgcggtaatacaactgatcaatgcctggcgcacgcaggggcatctgcgcgcaaagcttgatccacttggtttgaatcccccggctgacgttccctccctccagcctggtttttggggattaagcgaagaagacttgttgcaggaatttagcgtcacctttggcgcacacaccacgcaaatgccacttaagcaactgcttaacctgctggagcaagcctgggcgggtagccaggcttatgaacttgctcatctggaaaatcgtgaagaaatcaactggttgttatcacggattgagagcagcaatgcgccacaagcagatgtacaaacctgtattgctcgttttgaaaaactgatggcggcagagacgttagagcgttatctgcatacccgttatgttgggcagaaacggttttctctggaagggggcgaaagtgcaatcccggcgctcgatacgctgacaaaacgcctgcgtgcgcaaggtgtggaggaaatggtcattggcatggcgcaccggggaagacttaatgttctggttaatctgttgaataaagacccggcacagctttttgctgagtttgaaggcaagcagacgatcggcagtggttcaggcgatgtgaaataccacatggggtattccagcaatctggaaacacctgccggttcgctgcatgtggcgctggcgtataacccctcacatctggagatcgtgaatccggtggtgctgggccaggtgcgagccaggcaggaacgccgtggtgaggatggtcaggcaaaagtggtgggcgtacttattcatggggattccgcgttgggcggcctcggcgtcaaccaaaccacgtttaacttatcgcagactcagggctacggcactggcggtacgctacatctggtgattaacaatcagattggcttcaccacttcccgcttgcaggatatgcgttcttcacggtactgcaccgatattgccaaaatggtagcggccccaattatccacgttaatggcgatgacgttgacgctgtttgccaggtaatggaactggcgtgcgaatggcgagacaccttccggcgcgacatcatcatcgatatttgctgcttccgtaagcacggacacaacgaaagcgatgagccacgtcttacccagccacaaatgtatcaggcagtggatgctcaccctggtacgctcgcccgttatggtgaatctcttgcccgccgcggcctgttaactcaggcgcaacaagatgagatgacggcacgctatcgcgactggctggatagctgccagaaacgtgaaccgcagcctctcaaacctgcaattcactcttttagcgctaactggtatgggttgaccaaccctcactggagcgccccggtatctacggcattgcctcggcaaaagctggcagcgtatggtgaaatcatttctacactgccacccgatgtggtcgcacatcctaccattaaacggcaactggcgttacgccaggatatggccgcaggtactcagccaatagactggggaatggctgaaatgctggcctatgcatcgcttgtggatgcgggtgttggtgtgcgtctttctggtgaagactcagggcgtggcacgttcagtcatcgccatgcagtggtacatcatcaaactgaagcccgtcgttatctgccgttacagcatatccgcgctggtcaggcatctttcgatgtttatgattcggtgcttaatgaagaagcgctcttagcctttgaatatggctattcaacgtctgcgcctcagcaactggttatttgggaagcacagtttggtgactttgccaacggcgctcaggttgctattgaccagtttatctcgtctggcgaaaccaagtgggatcgctatagcggtttaaccattcttctgccgcatggctatgacggacaagggccggagcactcttctgcgcgtcctgagcgctggctgcaactgtgcgcagaaaacaacatgcaggtggtgatgcccagtgagtcagcacaaatgttccatttgttgcgcggtcaggcattacgcccaatgcgcaaaccgttagtgataatgatgagtaagcgtttacttcggtttaaaggcgctatgagcgagctttgtgaattcactgatggcgcttataaaccggtaatcaccgatccgcaattgcatcagtcccagaaagttaagcgcgttattttgtgtagcggccaggtctattacgacgtactggaagcccgtaagcagcgtgagcatgaagacgaagtggcgattgttcgcctggagcaactctacccgttcccggtcgcagaactgaatgatgttctggcgagttggccgaactgctgcgaatggatttggttgcaggaagagccagaaaaccagggcgcgtggcggcagattcgtcatgagctggcggcactgaaaattaacactccttactggcagtatgcaggccgcccggcagcggcagctccggcgacagggtatgggcgtgtacataaacaacaaatcgacgaatttcttgctgctgcgtttgcagatattcagccatgaaaggcgcacaaaaataataaggagaacattttatgatcgaaattactgtccctgtattaccggaatctgtcacggaaggcacgctgacaacctggtgtaaacaagaaggcgagcacgtaaaacgcgatgatgtgattgccgagctggaaaccgataaagtcattctggaaataccggccccgcacgatggcgtgttaagcaatattatcgtcagcgaaggtagcacggtcacgtccgcgcaactgttggcgcatcttaagccgcaagctgtcatagaagaaaccgtcacaccagtcaccgaaaccctggcgatgccttccgcacggctggaggcacagcgtagtggtgtcgaacttgctgacgttgcggggagcgggagaaatggacgtatcctgaaagaggatgtacagcgcgttactcctgcaccagtcattcagcctgaacgggtggcggagatcgcgccagctaaacccttgacaccgggtgctcgtcaggaacgtcgtgagccgatgtcgcgcttacgtcagcggattgctgagcgtctgctggcttcccaacaaaataacgccattcttaccacattcaacgaagtaaacatgcagagcgtgatggatttacgcgcccgctggaaagatcgttttgccgagaagcacggcgtgaagctgggctttatgtccttctttgttaaggccgttacccgggcgctggagcgcttccctgtagtgaatgccagcgttgatggcaacgagattatctggcgtgattattgcgatatcggcattgcagtgagcagcaaccgcggcctggtagtgcctgtgttacgcaatgcgcaatcactctctttggtggaaattgaacggcaaattgccgaatacgccacacaggcacgcaatggcaaattgccgctggaggcgttacagggcggcacgttctctatcaccaacggcggtacttttggttcgatgatgtcaacgccaatcattaacccgccgcagtcggccattcttgggatgcatgccatcacgccgcgcccggtcgcagaaaacggccaggttgttattcgtcccatgatgtaccttgctctcagctatgaccatcgcattatcgatggtcaggaagccgtgcagacattggtggcaatacgtgagctactggaatcaccggaacaactgttgctggatctttaaggagggcgccgatgagtacaatttttgatgtggcagttatggggggggggccaggtggttacgtagcggcactgcgggctgcgcagaatgggctttccgtagtatgtattgatgatggtgttaatgcacagggcgaaccttcgccgggcggtacgtgtctcaatgtcggctgtattccgtcaaaatcgttgctgcaatcttccgaactgtacgcgcaagtgcagcatgaggcgagcattcatggcgttaatgttgacggcgtatctttcaatgcagctgcgatgattcaacgtaaagacgccatagtaagccgcctgacaatgggcatcggcttgctgtttaagaaaaataaagtgaagtacctgtgcggcctcgcaacgttagaacatgctcgggatgagatttggcaattacgtgtaaacgatcaacaaatccgcgcccgtaatgtggtgattgcaacaggttctcagccgcgtcaactgcctggcgttaccattgataatcagcaaattctcgataatcgcggcgccctggcgttaaccgctgtgccgccgcgtctcggtgtgatcggcgctggcgtgattggccttgaactggggtctgtgtggaatcgggtcggttcagacgtcacgttgctggagatggcgccaacgttcttgcctgcactggaagctcgcctgtcgaacgaagtccgtaaagcaatgattgccagtgggatgaaaatgcaactggcagtagagattgaggctattgaacaacgggatgacggtgtgcatgtgcgctggcggcagggtgagaagcgagaagaaagccgcttcgataaattaattcttgccattggacgtgtaccgcgactttctggtgtcgatctcgtgcaactcggtcttgaagccgacaaccgtggcggtattgccgtcgataacttatgccgtaccgggaaagccgggctgtgggcaattggtgatgtcgtgcgagggccgatgctggcgcataaagcgatggctgaaggtgtggtggttgcggatcaaattgccggactggcggtagagccgattaattttgcgctgatcccttcggtgatttacacccaaccggaagttgcgtgggtaggggaaaacgaggcctcactgaaagccgctggcagagtctttaacaaaggaaattctctgtttgccggtaacggtcgcgccttagcattaggccaggaaggtgggcgttgcacgttatacagcgataaacacactgaccgcgtacttggcggagcgattgttggcccgcaggcatccgagctgatcaatgaaattgcgctggcgatgacttttagcgcctctggcgaggatattgcctgtgcgatccatgcgcatccgacattaagcgaagtcatccacgaagcagcaatggccttgaataataaagcattacacggataacacataccactgagggaatatatgaatttacatgagtatcaggccaaatcgttactggctggcatggggatgccgtgtccaaaagagatagccatccaacagatttcgcaactggcagatgcctggcaacatattgcttgcccgagtaaaggcgcggtacttaaagcgcaggtacatgctggtgggcgcggtaaagctggcggcgtaaaagtgcttaagcagctgccggaagcacaggcttttgtacagcaaatgttgggatcgcaactggtgacttatcagaccgggccagaagggcagtatgtcagcagtattttgctgtgcgaaaacatctatccggtacgccaggaactctattttggcatggtggtggatcgtgaaagccagcgggtcacgtttattgtcagcccggaaggtggcgtggaaattgaaaaagtcgcccatgagacaccggagaaaatcagcagtgtcagcattgatccactgacaggcgtgcagccttgccatatccgcgaaatgtttgctgttctgcaactggaacacgggctatttgctgcctttagtcgcctggttaatcaggcgtggaaagcctttaacgaactggatttcgccctgctggaaattaaccctctggtgttgcgggaaacgggcgaatttatgtgtgcagacgcgaaagtatcgctggatgataacgcgctgtatcgtcacccggaactccaggtgctacgtgatgaaacccaggaagatccacgcgaaagccaggcagcgaagcttgatcttaattatgtctcgctggacggaaatatcggctgcatggtcaatggtgcagggctggctatggcaaccatggacatcatcaagctatacggtgaacaacccgcaaacttcctggatgttggcggtggcgcaacccaggagcgcgtcagtgaagcctttcggctgattgtttccgacagcaaagtgaaagccattctggttaatatttttggtgggattgtccgttgcgacatgatcgccagagccattattcatgctctgaatgaggcccgtatcaccctgcctgtcgtggtgcgtctctccggtaataacgctgccgaagggcagcggttactggcagaaagtggcctgacggtggaagccgtcaattctctggatgatgccgctaaacgcatcattgcgttactgaattaacaggaggttaagatgagcgttttgatcaacaaacacacgcgggtactggtgcagggcattaccggcaaaaacggcacatttcatacagagcaggctattgcgtatggcacgcagattgtgggtggagtgacgccaggtaagggcgggcaacggcatctggatcgcccggtttttgattcaatgaaagaagcgatgcgacaaactgaggctgatgccagcgtgatttatgtgcctgcaccgtttgtgctggattctgttgttgaggctattgaagctggcgtcaaattggttgtggtgatcactgaaggtgtaccgacactggatatggtgaaagttcgtcggctgcttgactgccacccggatgtgcggctgattgggccaaactgcccaggagttatcacgccgggcgagtgcaaaatcgggattatgcctggtgaaatccaccgcccagggcgtattgggattgtttcccgctccggtacattaacctacgaagctgtagcgcaaaccacggcgctgggacttgggcaatccacctgtattggtattggcggcgatccggttccggggactaactttattgatgcgctgcgtttattcgaaaatgatccgcaaacagacgcggtaattatgatcggtgaaattggtggtaatgcggaagaacgggccgcggaatttattcgccatgaaatgaataaaccggtcgtaggttatattgccggtgtcactgcaccaaaaggaaaacgcatgggacacgctggagccattatttctggcggtagcggcagtgcggaggataaattccgggcgttcgataaagcaggcatggcatggacacgaaatccagcattacttggcgaaacgttatggaatgttattaagtaatccataaatgaatatcaagggagcatatcgctccctttttttatctgtgtggtaagagaatcaccttttatttactgtgcggaaaaccgcgcacaaaataaaaagaataaataataaaatcattaaataacaaagcgttattaaaaaattaaagatggcatagctcctgcaatagccaggcaggttttttatttttcacaatgaggtgaatatgtcatcaatatcccatggcgcaccacaaaagcgtcgaattatccctaatcccggcctgtggttggcgatcattgccggaattattattacccttctgccactgggcgataccttgcccgtcgctggacaaaatatgatcgccattctggtgtttgccattattgtctggatcagcgaagcgatggattacaccgccagtgcaattgttatttccgcactgattatctttatggttggttttgccccggatatgaatcacccggacacgatccttggcaccgcgaaagcgctgaaaatgactctgtcgggtttttctaattctgctctggcgctggtggcagcagcaatgtttatcgcggcggcaatgaccattaccgggctggataaacgcattgcgctgtttactatgtcgaaaataggtgccagcagccgcagcattattatcggtgccattgtggtgaccatcgtcctgagcctggtcgtacccagtgccactgcccgtacggcttgcgtggtgccgattatgatgggggtcattgcggcatttaaggtggataaacattcacgtttagcggcgtcaatgatgattgttatcgcccaggcgaccagtatctggaacgttggtattcaaacttcggcggcgcaaaacctgctttctatcggttttatcaataaaactttcggcgccgggcattctgtcagctggcttgactggctgttagcgggcgcgccctggagcctcaccatgtcggtgatcctctatttcctcgcacgtaaattgttgccgccagaaacggaagctgttgaaggggggagcgaggccattaaaaaagcactcgcagaattagggccaaccaccggtaaagaaaaacgcttgatcggtatttcgctgttgttactgctcttttggtctactggcggaaaattacacagtattgataccacctctgtcacccttgccggactggcgattatgttgctgccaggcatcggtgtaatgagctggaaagaggtcgaaaaacgtgtgcagtggggcacgttgctgatgtttggtattggtatcagcctggggtccacgctgcttgatacgcaggcagcttcatggatggcgaactatgtggtgaaaggttttggtctcgatggcttgccatcattagccatcttcgcgattctcgccgctttcttgataattattcacctggggtttgccagtgccactgcgctaactgccgcattgctgcccatcctgattagcctgttaagcagtctgccgccagaactcggcgttaacccggtcggcatgaccattctgctcgccttcagtgtcagttttggcttcatcctgccgattaacgcgccacaaaatatggtgtgtatgggtacggataccttcacgccacgccagtttacccgtgtgggactgtacctgacggtaatcggctacctgttgttgctactgtttgccgctacctggtggaaaattttaggtctaatgtgaggaaaccaacgatgtcattacaaattgctgttgaaaaagtgcgttggttagctgccgggctgctggaacttaatggctgtgatgccgatatcgctcaggatgtggcggaacatatgattgaagcggaacgttatggctttgccagccacggcgtcacgctgctaccgaaatatctggaaaatatcgctcgtggcgatgtaaccgcgaatgcccgcccggaatgcttaacaagtgaaggtaatttacaacgttttcatgcccacaatggctttggtcaacacgccggaaaagtggcggtaaatgctgccatcgaacaagcaaaacgccgtggtttttgcctgttaacgttgtgccatgcgcatcatttagggcgtatggggcattacgggcaaatggttgctgatcaaggcctggcgatgctggccatgagtaacgttaccgggcgtccggcgctggtcgcgccctggggcggtgcggaaccgcgtatgaccactaaccctttctgctttgcctggccgttcagtgatgggcgtccgccgattctggttgattttgccaccagtagcatggcgctaaataaagcacgggtaatgtcgtccaccgggaagcaggccgcgccgggacaattgattgatgcacaggggaatccaagcaatgatcctggggtgttattcagcaatcctccaggggcgttactgccatttggtgagcataaaggatttggcctggcactgatgattgaaatgatggcggggatcttatctggtggtgacacgatcgccgaagatcatcagacggatggatctgcgcataatcatctttttgcgttgattatcgatcctgatcaattcaccgatctggcaggggagaaagggcagttctttgcggattatctgttagctacgcagcctcaacctggcggcaatccggtgatttaccccggtatgccagaagctgccaaccgggaacgcaatgcgaagatgattacgatcccggtatcattctggtcctgggtagttgaacattacgcccgcaaaggtatcgatttggggttacatcctcaggaatcagcattagctggatgattctggtcgataaacttgcggttgaatctgatgtttgttgagtttgtcatataaagtcttgcgcggcagctgtaatagccgcgctgtcaaactgacctggccttccgtttgtcgcagcatatcttcgattaactttttctcgaaagcatcaatgcaggcggtaaggccactctcttcttgctgagtcattggcactggctggtggtgggtcagtaaaccgagaacaaaacgctctgcattgtgtttaagttcacgtacattgccaggccaactttgtgattgcaaccaggccagtaacatgggagaaatatcaggcagaggacgattatatttttgtgccgcctgactggcgaaccagtaaaacagttcagggatatcttctcgtcgctggcgtagaggtggaatattcaggctaaccacattcagacgataatagagatcgagacgaaacagatgttcttcgctgcgacgcagtaaatcttccttggtcgctgcaataacacggcaattcaccggaattaattgattggcacctaatcgttcaatggttctttcctgcaatacacgtagcagttttacctgcattcctgatggcattccctctatttcatcgagaaataacgtaccaccatttgcatgttcaatttttccaatacgctttttaaccgcaccggtaaatgcgcccgcctcatgaccaaatatttcgctttcaaacaacgtttctggtaagcctgcacagtttaaggcaacaaactgcccctgacggcgggtactccagtgatgcagcattctggcgacgacttctttaccacaacctgtttcaccataaataaggacatcggcaccggtatctgcgacattaaggatcattttacgcagttgttgcatctgcggactacgaccaatcagcaccgggccattttcctgttgcagattcgccagtaattgctgattttctaaaaccaatcgccgtttttctaccgctctggcaataatactcaataatttatctgagctacttggtttctcaatgaaatcgaatgcaccattacgcatggcatccaccgccatttccacgtcaccgtgtccggtaattaaaataaccggaattttgctatccatttcgttgatgtaactgaggagctctagtcctgatattccaggtaacctgacatcggtcagtataataatgttggcctgactttgaataaggggaatactgtgttctgcatcgcaacaggaaataacacgataaccagccagcgtgagcgtttgttcacaggcaaaacgtacatcgtcactatcctcaatataaactatagtaatttcactggatttattattcatgttcttctccccattcaggccaggttaatgtcattactgcgccgccttcaggatgattactggcgtggagtgcgccgttcgaatttcggacaatttcgctgactattgccagtcccaaccccattcctctacgtttagtggtaaaaaatggttcaaatatgcgatcgacaacttcaggtgcaaaaccgccaccgctgtctttaatggtaataataactttgttatttgcctggcgaatggcgatatccagtcgtttgtaagagctaccttccatagaatctaaggcgttgctaattaaattactgaatatctgttcaagaccgagctcatcgcaattgacaaataacggcatggatggggcttttattcgtcgctcaatgttatttttctccatgctgtgattaagtaacgccacggcgctatacatcactttgatgacatcggcagaacctttaggtacgcgatggcgcgaggcaaatgctttaagttcggaaatgagctgcgtcatccgctcaatcactgaaataatatgtttcagattctgttcaacctgcggatacatctctttttttagcatagtacgcgcgttatcagtaagtgcgtgaatggcggctaacggttgattttgttcatgggcaatttcggttgccatctgtccaagcgccgccagtttgttggactctgccagttcactacgcgtaatttgtaatacttgttcagcttgactgcgctcttttatctcctgtattaatttttgattgatcaattccagggcagatgtacgctctttaacctgtttttctaatgtttcattcgcaagtgttaataattgttgtgcatgagatcgcattctccagtatttaataaataacaaaaacagcaggtaaataattagtgtaatgactaacgaaatagcccatgaccagtacaggttatctaaggggaccataattgtcattttccagttaaattctggaatggctatttgttgcgtataatattgcgggaataaacagagttgttcttttttatctttcaggaaagtaaaattgctcacggtataacagggataataatccgccggtaaaagattgtcgagactatattggcgggtagattgtattttttgttttgcctgaacaggtaacggttgcagtgttcgcattcgccatggcgattttgaacttaaaaatataatcccatgttcatcattcacgataatattttcaggaccttcggcccatgctttttcaatttcattaagacttatttttactactacaacaccgacaatttttcctttatcttttatacttgtagagaggaagaatcccggtgtattcgtagtgctaccaataccgtaaaagcgtccatttaagccagacatggcgtgtttataataggggcgatagctataattttgccctacatagctgccggggtcctgccagttgctagaagcgatggccttaccttgggtatccagaataaatattgctgcggttttgagttgagtattgaaatgtgcaattcgttgattgagttcgctggacgtcatatcgtcaggcgtaattaccgcctgacggatgatatggtctgttgagagcatatagggtaaaacataaaattgctcgatggtggaatataatgtggacttatacatttcaagccgcattttatcggtactggacaaggtattaaaacgcaagtgcaaaaaagcgattgaaaccgcgagcatgataagaaaaagtgaaatgcttgtaatgtgaaatcgccatttgttcttaaatatataattccacgatattttcattcatcatccattgaatgcatttatatttatcatcagtatattccctgaacaatgtttgcgagaaccaaaagagtgccattgtgtgaatgtgtaagcagaataaccgtggcaatgtgtggtttatcgcacaggtattccaaatgtgatcatgctctttttatgtgacaaatccgcagataatccttcctttcccccgcggttggcgttatggtcagatggttttttcaacaaacgcacaataataagtttcaacttactgactatttagggaaaaatatgcgcaagatcacacaggcattgagtgccgtttgcttattgttcgctctaaacagttccgctgttgccctggcctcatctccttcaccgcttaatccgggtactaacgtagccaaactcgctgaacaggcgccaattcattgggtttcggttgcacaaattgaaaatagcctcgcaggacgtccgccaatggcggtggggtttgatatcgatgatacggtacttttttccagtccgggtttctggcgcggcaaaaaaaccttctcgccagaaagcgaagattatctgaaaaatcctgtgttctgggaaaaaatgaacaatggctgggatgaattcagcattccaaaagaggtcgctcgccagctgattgatatgcatgtacgccgcggtgacgcgatcttctttgtgactggtcgtagcccgaccaaaacagaaacggtttcaaaaacgctggcggataattttcatattcctgccaccaacatgaatccggtgatctttgcgggcgataaaccagggcaaaatacaaaatcgcaatggctgcaggataaaaatatccgaattttttatggtgattccgataacgatattaccgccgcacgcgatgtcggcgctcgtggtatccgcattctgcgcgcctccaactctacctacaaacccttgccacaagcgggtgcgtttggtgaagaggtgatcgtcaattcagaatactgacagagcgggagagcgtaatactctcccgaatgctgtttttttaatcacacctttatcctttcgctgtcttgctgcaaactgattaagagagttttatcaaggagcagcacatgtggtatcaaaagacgctcacgcttagcgccaaatctcgtgggtttcatctggtaacggatgaaattctgaatcagctggctgatatgccgcgcgttaacatcggtttactgcatctgttgctgcaacatacctccgcctctctgacacttaatgagaactgcgatcccaccgtacgccacgacatggagcgttttttcctccgcgccgttcccgataacggaaattatgagcatgactatgagggagcagacgatatgccttctcatatcaaatcctcaatgctgggaacatcgcttgtattgccggtgcataaagggcgtattcagaccggcacctggcaaggcatctggctgggggaacatcgcatccacggcggatcgcgtcgcatcatcgcgacactacaaggggagtgaaaaatgaccatttcggagttgctacaatattgcatggcaaaaccaggcgcagaacagagcgtgcataacgactggaaagcgacgcagatcaaagtgggagatgtgctgtttgcgatggtgaaagaagtagaaaatcgcccagctgtttcgctgaaaaccagcccggagctggcggagctgctacgtcagcagcacagcgatgtgcgtccaagccgccatctgaataaagcgcactggagcaccgtgtatctcgacggttcgctgccggattcgcaaatctattatctggtggatgcgtcttatcagcaggcggtgaatttgctgccggaagaaaaacgtaaattgctggtgcaactctgaaagaagaaggccgctctgaaagcggccttaacgattacagcatcggcttgaggaagcgcgccgtatgcgaagctttgcactctgcgacggtttctggcgtaccggagacgaggatttcgccgcccccactgccgccttccggtcccaggtcgacaatccagtcagcggttttgatcacgtcgagattgtgctcaattaccacaatggtattgccctgatcgcgcagtttatgcagtacgtcgagcagttgctgaatatcggcgaagtgcagaccggtggtcggctcgtcgagaatatacagcgtctgcccggtgccgcgttttgacagctcacgcgccagcttcacgcgctgggcttcaccaccagaaagtgtggttgcggactgcccgaggcgaatgtacgtcaggccaacatccatcagcgtttgcagcttacgcgccagagctggcaccgcatcaaagaactcacgcgcctcttcgatggtcatatccagcacttcgtggatggttttgcctttgtacttaatctccagcgtttcacggttatagcgtttgcctttgcactggtcgcacggtacgtaaatgtccggcaggaagtgcatctccactttgatcacgccgtcgccctgacaggcctcgcagcgtccgccacggacgttaaagctgaaacgtcctggcgtatagccgcgcgcacgggattccggtacgcccgcaaacagttcgcgcacaggtgtaaacacgccggtataggtcgccgggttagaacgcggagtacgaccaattgggctttggtcgatatcgatcactttatcgaaatgctccagtccctgaatatcgcgatacggtgccggttcggcgatggtcgcaccattcaactggcgttgggcaatcgggaacagtgtgtcgttaatcagtgtcgatttaccggaacctgaaacccctgtgatgcaggtaaacagaccgactggcagcgttagcgtcacgtctttcaggttattaccgcgtgcacccgtcagcttcagcactttttccggattcgccggaacgcgtttcttcggcacttcaatcttgcgtttaccgctcatgtactgtccggtcaacgactccggcaccgccataattgcttccagtggaccttccgcgaccacttcaccgccgtgaacacccgcacccggaccgatatcgatcacatgatcagcggcgcgaatcgcgtcttcgtcgtgctccaccacaatcacggtattaccgagatcgcgcagatggataagcgtacccagcaggcgctcgttatcgcgctggtgcaggccgatagacggctcatccagcacgtacatcacgccaaccaggcctgcaccaatctggctcgccagacgaatacgctgggcttcaccgccggaaagtgtctctgctgagcgggaaagtgtcaggtaattcaggccgacgttaacgaggaatttcaggcgatcgccaatctccttaagaattttttccgcaatcttcgctcgttgacctgcgagtttgagattgttgaagaattccatcgcatgaccgatgctcatgtcggagatagcaggcagcggcgtattctcgacatatacatggcgcgcttcccgacgcagacgcgttccttcgcagctggcgcacgggcgattgctgataaacttggctaattcttcacgtaccgcactggattccgtctctttataacggcgctccatattgtgcagcacgccttcgaacggatgacgacgaatggaggtatcgccacgatcgttcatgtatttgaattcaatattttctttgccagaaccgtacaacaccactttatgcacgttcgcgctcaggctgccccacggcgcttcgacgtcgaacttatagtgatctgccagcgatttcagcatctggaaataatagaagttgcggcgatcccagccacggatcgcaccgccagccagcgataattccggattctggatcacgcggtcaggatcgaaatattgctgtacgccaagaccgtcacaggtcgggcaggctcccgccgggttgttaaatgaaaacaggcgaggttccagctcgcgcatactgtaaccgcaaatcgggcaggcaaagttggcggagaacagcagctcttccgctttcgggtcgtccatatccgccactaccgcggtaccaccggaaagctccagcgcggtttcaaacgactcggcaagacgttgggtaagatcgtcacgcactttgaagcgatcaaccaccacttcaatggtatgtttcttttgcagttccagtttcggcggatcggaaagatcgcagacttcgccatcaatacgagcacggatgtaaccctggcttgccaggttctccagcgttttggtgtgttcgcctttgcgctctttaatgattggcgcgagcagcatcagacgcttgccttccggctgcgaaagcacgttatccaccatctggctgacggtttgcgccgccagcggaacatcgtggtccgggcagcgcggctcaccaacgcgagcgtacagcagacgcaaatagtcgtggatttcggtgattgtccccaccgtagagcgcgggttatgagacgtcgatttctgctcaattgagatggcaggagaaagcccctcaatatggtcgacgtccggcttctccatcagtgacagaaactgccgcgcgtaggcggaaagggattcaacgtaacggcgctgcccttcggcatataaggtgtcgaaagcgagcgaggatttgccagaacccgaaagcccggtcacgacaatgagcttgtcgcgggggataacgaggttgatgtttttgagattatgggtgcgggcgccccgaacttcgatcttatccattcacctttcccggattaaacgcttttttgcccggtggcatggtgctaccggcgatcacaaacggttaattatgacacaaattgacctgaatgaatatacagtattggaatgcattacccggagtgttgtgtaacaatgtctggccaggtttgtttcccggaaccgaggtcacaacatagtaaaagcgctattggtaatggtacaatcgcgcgtttacacttattcagaacgattttttttcaggagacacgaacatggccagcagaggcgtaaacaaggttattctcgttggtaatctgggtcaggacccggaagtacgctacatgccaaatggtggcgcagttgccaacattacgctggctacttccgaatcctggcgtgataaagccaccggcgagatgaaagagcagactgaatggcaccgcgttgtgctgttcggcaaactggcagaagtggccagcgaatatctgcgtaaaggttctcaggtttatatcgaaggccagctgcgtacccgcaaatggaccgatcaatccggtcaggatcgctataccacagaagtcgtggtgaacgttggcggcaccatgcagatgttgggtggtcgtcagggtggtggcgctcctgcaggtggcaatatcggtggtggtcagccgcagggcggttggggtcagcctcagcagccgcagggtggcaatcagttcagcggcggcgcgcagtctcgcccgcagcagtccgctccggcagcgccgtctaacgagccgccgatggactttgatgacgatattccgttctgatttgtcattaaaacaataggttatattgttttaaggtggatgattaaagcatctgccagccataaaaaagaagcctccgttatggaggcttctacatatcaagtcaaaatcattggccattgtggcggtgtctgattcatctcttctaccatcaccgactcgatgttgtgccagatggcggtgatatccgccattgtgatgccaagcaaccccattgcgaaccagcaggcggaaactacgcccagaccgctgctgatcactgcaagcccgacataatcagcccgacgaaaacggatgttgagcgtgctagccagaaacatcattacggcactaagaagttgccagcgaagaagaaccacgccagtggtgagggtagccatcaaacaattcctcggaaaagagctgatgccctggacagcgcggcgttgttcacgggaggcgtgatacactctggctatcgcggggcttgcagaacacaaaaatgaaacactctgtttgtttcatgaattttgtgaactatatcacaattggttgtttgttagccagattaggccgtgacttttattgccgtacagattatgtgttttttcagcggcattaagggtatatcttcccgccgcctctgcattcctgaaggtgattaatttttaagatcaatgaattatcgtcatcctggtgacgattaaaaaggtctcaattttatatcaggcaaaagtgctatttataccgtaagatttatctaaagacgtcggtagccagggtttcaccttgcaataaccgggtataaacaggcagggaattgatagcaatgagtcatcgtgcacgacaccaattactggcgtttccgggcattatctttttagttctctttcccatcattatgtcgctatggattgccttcttttgggcaaaatcagaagtgaataatcagctccgaacttttgctcagctggcgttggataaatctgagctggtcattcgtcaggcagatttagtgagcgatgcagctgaacgctatcaggggcaagtttgcactccagcccatcaaaagcgaatgttgaatattattcgtggctatctttatattaatgaattgatttatgctcgtgataaccattttttatgctcatcgctgatagcgtctgtaaatggctatacgattgcaccggccgattataagcgcgaacctaacgtttctatctattattaccgtgatacgccttttttctctggctataaaatgacctacatgcagcggggaaattatgtggcggttatcaaccctctcttctggagtgaagtgatgtctgatgatccgacattgcaatggggagtgtatgatacggtgacgaaaacctttttctcgttaagcaacgaggcctcggcagcaacgttttctccgctgattcatttgaatgatttaaccgtacaacgaaatggctatttatatgcgacagtttattcgacaaaacgcccaattgcagccattgttgcgacttcatatcaacgtcttataactcatttttataatcatcttatttttgcgttgcccgccggtattttggggagtcttgttctgctattactctggctacgtattcgacaaaactatttgtctcccaaacgcaaattgcaacgcgccctcgaaaaacatcaactttgcctttattaccagccaataatcgatatcaaaacagaaaaatgtatcggcgctgaagcgttgttacgttggcctggtgagcaggggcaagtaatgaatccggcagagtttattccgctggcagaaaaggaggggatgatcgaacaggtaactgattatgttattgataatgtcttccgtgatttgggcgcgtatctggcaacacataccgatcgctatgtttctattaacctgtcagcctccgattttcatacctcacggttgatagcgcgaaccaatcagaaaacagagcaacatgcggtgcgcccgcagcaaattaaatttgaagtgactgaacatgcatttcttgatgtcgacaaaatgacgccgattattctggctttccgcaaggccggttacgaagtggcaattgatgattttggtattggctactctaacttgcataaccttaaatcattgaatgtcgatattttgaaaatcgataaatcgtttgttgagacgctgaccacccacaaaaccagtcatttgattgcggaacacatcatcgagctggcgcacagcctggggttaaaaacgatcgctgaaggtgtcgaaactgaggcgcaggttaactggctgcgcaaacgcggcgtgcgctattgccagggatggttttttgcgaaggcgatgccgccgcaggtgtttatgcaatggatggggtaattacccgcgcgggagttaacgcgcgggcaataaaactacaggcggtggcgataatcgctgggagtgcgatcaaactgccgacggaaaacgcgggagaaggtctgctgagagacataacccaggtccattgcgatatcaaaaatcggacgctcggtggtgcgcaactcaacggcggccagtaacagacggcgctggcgaatgtaatcgccaagcgtctgatgcgtcaccgtgcggaacatccgttgcaagtaccactttgaatagccagatttttttgcgacgacatcaatgttaagcggctggtcaatatgctcgtcaatccatgcgataagatcctgaataattttctgatgggacataaatctgcctcttttcagtgttcagttcgttaattcatctgttggggagtataattcctcaagttaacttgaggtaaagcgatttatggaaaagaaattaccccgcattaaagcgctgctaacccccggcgaagtggcgaaacgcagcggtgtggcggtatcggcgctgcatttctatgaaagcaaagggttgattaccagtatccgtaatagcggcaatcagcggcgatataaacgtgatgtgttgcgatatgtcgcaattatcaaaattgctcagcgtattggcattccgctcgcaaccattcgtgaagcgtttggcgtgttgccagaagggcatacgttaagtgcgaaagagtggaaacagctttcgtcccaatggcgagaagagttggatcggcgcattcataccttagtggcgctgcgtgacgaactggatggatgtattggttgtggctgcctttcgcgcagtgattgcccgttgcgtaacccgggcgaccgattaggagaagaaggtaccggcgcacgcttactggaagatgaacaaaactaaagcgccacaagggcgctttagtttgttttccggtctttgtctttctctctatcccgctggtacacaggagggtttcccccgacgtcaacacacctcattcgagcacgtggtggaggttccggttggtgttgatgctttaattgtatgtgaccggcgtttcttcgccagtgtaaaagtacactttttagccgcaatatttttgtcatctcagacgattttttatcgcaatcctgaacggtatacggctcgataacgctgcaatcttgcgcatcgacgataacgtttgcgcatcaattgcctggtttttcatcgtcaagacaataaaagagaaaaaagcagcaaacttcggttgaaaaagccgctatgatcgccggataatcgtttgctttttttaccacccgttttgtatgcgcggagctaaacgtttgcttttttttgcgacgcagcaaattgtcgcaaacctggagcaggaagataacgtttcgctggcaggggattgtccgccacgcatcttgacgaaaattaaactctcaggggatgttttcttatgtctacgccatcagcgcgtaccggcggttcactcgacgcctggtttaaaatttcacaacgtggaagcactgtccgtcaggaagtggttgccgggttaacaacgtttctggcgatggtctactcagttatcgtcgttccaggcatgttgggtaaagcgggcttcccgcctgcggcagttttcgttgcaacctgtctggttgccggactcggttctatcgtgatgggtctgtgggctaatctgccgttggcgattggttgcgccatctctctgacggcgtttaccgcattcagtttggtgctggggcaacatattagcgtacctgtcgcgctgggtgccgtgttcctgatgggtgtgttgtttacggtaatttctgccacgggtatccgtagctggattttgcgcaacttgccgcacggtgtggcgcacggcacggggattggtatcggtctgttcctgctgctgattgctgctaatggtgtcggtctggtgattaaaaacccacttgatggtctgcccgtcgcgctgggggatttcacgacctttccggtgatgatgtcgttggtgggtctggcagtgattatcggcctggaaaaactgaaagtccctggtggcattctgctgaccattatcggtatctcaattgtcggtttgatcttcgatcctaacgtccatttctccggcgtttttgccatgccttcattgagcgatgaaaacggcaattcactgattggcagcctggacattatgggcgcgctgaatcctgtagtcctgccaagtgttctggcactggtgatgacagcagtatttgatgccaccggaactatccgtgccgtcgccggtcaggcgaacctgctggataaagatgggcagatcatcgacggcgggaaagcactgaccaccgactccatgagcagcgttttttctggcctggtgggtgcagctccggcagcggtatacatcgagtctgcggcgggtacggcggcgggcggtaaaaccggtttgacggctatcaccgttggcgtgctgttcctgctgattctgttcctctctccgctctcttacctcgttccggggtacgcaacggctccggcgctgatgtacgttggcctgctgatgctgagcaacgtggcgaaaatcgactttgctgattttgttgatgcgatggcgggtctggttacggcggtattcatcgtgctgacctgtaacatcgtaacaggcatcatgattggcttcgcgactctggtgattggtcgtctggtttccggcgaatggcgcaagttgaacatcggtacggtcgttattgccgtggcgctggtgaccttctatgcgggtggctgggctatctaatcttacataggattctgaaaacgggtggcaatggctgcccgtttttattttctccgcacattgtgtgagcttttgcgatattctgaaaaaatgagaattcaggcataacgcctttctcagatcataaaaaacatcgcaaacagggaacgcatggaaatcttcttcaccatactgataatgaccctcgtggtctcgctgtccggggtggtcactcgtgtcatgccctttcagatcccgcttccgcttatgcaaatcgccatcggtgcgctactggcgtggccgacgtttggtttgcatgtggagtttgatcctgaactctttttagtcttgtttatcccgccgttgctgttcgctgatggctggaaaacgccgacccgtgaatttctcgaacatgggcgagagattttcggcctcgcgctggcgctggtggtggtcaccgtggtcggcattggcttccttatttactgggtggtgccgggcattccgctgatccccgcctttgcgctggctgcagtgctttctccgaccgatgctgtagcgctctccgggattgttggcgaggggcgcatcccgaaaaaaatcatgggcattttgcagggcgaagcgttgatgaatgacgcctccggcctggtgtcgttgaagtttgccgtggcagtggcgatggggacaatgatcttcaccgtcggcggtgcgacggtcgaatttatgaaagtggcaataggcggtattctcgccggttttgtggtgagctggctgtatggtcgctcgctgcgattcctcagccgctggggcggtgatgaacccgcgacgcagatcgttctgctgttcttgctgccattcgcttcttatctgattgcggaacatattggcgtttccggcatcctcgctgcggttgccgccgggatgaccatcacccgctccggtgtgatgcgccgtgcgccgctggcaatgcgcctgcgcgcaaacagcacctgggcgatgctggaatttgtctttaacggcatggtgttcctgctgttaggtctgcagttgccggggattctggagacgtcgctgatggcggcagaaatcgaccctaacgtcgaaatctggatgctgtttaccgatattattctgatatatgcggcactgatgctggtccgtttcggctggctgtggacgatgaaaaagttcagcaaccgcttcctgaagaagaagccgatggagtttggttcgtggactacacgagaaatcctgatcgcgtctttcgccggggtgcgtggggcgatcactctggccggtgtgctctctatcccgcttctcttgccggatggtaacgtcttccctgcgcgctatgagttggtgttcctggcggctggcgtcattctcttctcgttgtttgtcggcgtggtgatgttgcctattctgctacaacacatagaagtcgcggaccattcgcaacaattgaaagaggaacgtattgcacgagcggcaacggcagaagtggcgattgtggcgatccagaaaatggaggagcgtttggcggcggataccgaagagaatatcgataaccagctgctcacagaggttagttctcgcgtcattggtaacctgcgtcgtcgcgccgatggacgtaatgatgtagaaagttcaatcctggaagagaacctggagcgtcgcttccgtctggcggcattgcgttctgaacgtgctgaactgtaccacctgcgcgccacgcgggagatcagtaacgaaacgctgcaaaaattactgcacgatctcgatttgcttgaagcgttgctgattgaggaaaatcagtaatctgcatggttggcgggcgagcccgccaacccgacttacactggcgttaaccagtatccttcacaacagctcagccacgcgtgggcagagtgggaaaggtaaacgccctcacgccaaatcattcctaatttccagcttagttcgctttccagcggtagccattttaaggtgtttttatctaatcgctggcaaatgggttccggcaatatggctattccgacaccggcctgaaccatcgcggcgagaaaatcccattgcccgctgcgaactgcaattctcggcttaacgccatgttcatcgaataacttcatcaattgcttacttaaggcaaaatcttcgttatagataagtagaggatgttccgccaatgtctccggtgagacggcatcacattcaagccatttacctgaatgtggcgtcagtacacatagtggatgactaaacagcgataacgttgtcaggccgctttcttctactggcagggctgtcagtgccatatccagttcaccgttcatcaccgcttgttgtaccgtcagaccaccaaactccgaaattttcaattctacgccggggtaacgctggcgaaaaaggccaatcggcccggccatcaacatcccaaccatcggcgggattcccagccgcaaaacgccggttttaagctgattgatatcgctaagctcagcttccagttgccgaaactcagccagtaaagccagcccgcgctcaaatacgacgcgaccagtatcagtgagaagcagccgacgaccatcgcggatcaacaatatacagttcagctcatcttcgagattcttcagcatcttgctgatagttggttgggtgacaaacaacttctccgctgcgcgggtgaagctttgctggcgcacgacttcgacaaaataacgcagcgttctgatatccataactattccctttgactatacctgcaatgattttaattcatttcagtcaggggcgagcgctctctatacttaccattctgttttattttcaggatatcctctcatgcccgtggcgcttcgccgcattacccctgccgtagtgcaatctatccaggtattttttcaggttgtgctgtatgcaggtttatttatttttgcgcagtatctcgtctcctggctgcatttgccgctgcctgccaacctggtggggatgatcctgatgctggcgctgattgtttgtcgcattcttcctctgcaatgggttcgagccggggcgcgttggctattggccgaaatgttgctgttttttgtccctgccgtggtggctgtggtgaactatgcacaactattactggtggatggctggcgtatttttgctgtgatcgcgctgagtacggtgatggtgctgggcacgactgcctgggtagtggaaaaagtctatcgctatgaaatgcgcaggttaaaccgtggctaattttcagctaagtatgctctgtctggcaattacgctagttatctattttcttaacaaacgcctttatcgccgctttcgtaaattgccattgatgcctctggtgctgacgcctacgctactggttatgctgctggtttttggcaatatttcctggcaaaactatattggcgaagcgcactggttactatggctattaggtccggccaccatcgcctttgcggtaccagtgtatgacaatcgggcgatcattaagcgtcactggatgtcgttgacggcaggcgtactgacggcaacggtggtggcagtgaccagctcagtgtggctggcgcgattgtttaccctgccagatgagatccagcgtagcctggcggtgcgttcggtcactacgccatttgctttggcagcgagccagtcgctcggcggacagcctgatctggtggcgctgtttgtggtggtcaccggtgtgtttggcatggcgattggcgacgtgttgtttttacgtctctctattcgcgaagggatggcgaaaggtgctggattcggcgcggcatctcatggtgccgggactgcgcggtcgtatgaactgggtcaacaagaaggcgtagttgcaagcctggtcatgatgctttcaggtgtattgatggtattggtttcgccgctggtggccaggatgatgttctgaagaaattccccgatcaagcgaccggggaaggggagagattaatgcgcgcggccctgctcaacgccaaagccagtctgggaacggataaactgcgcacggaacagttcacgctcgcgcgcaccttccgctgaattatccgttgccgagaataaccagataccgaggaatgccacgctgatagagaacagcgccgggtattcatacgggaagatggctttttcgtgaccgaggatctgtacccaaatagtcgggccgaggatcatcagcaccaccgcagtaatcagtcctaaccagccgcccagcattgcgccacgggtagtcagtttcgaccagtacatggaaagcagaatgatcgggaagttacagctcgccgcgatggcaaacgccagccccaccataaaggcgatgttctgattctcaaacagcacgccgaggataatggcaatcacaccgaggatcagtacggtgattttcgatacccgcagctcttcacgttcggtcgcaccttttttgaagacgttagcgtacaggtcgtgagacaccgccgatgcgcccgccagcgtcagacccgcaaccaccgcaagaatggtggcgaaagcaaccgctgaaataaagccgaggaacaggttgccgcccaccgcattggccaggtgaactgctgccatgttgttaccaccaatcagatggcccgccgcgtctttatattccggattcgcaccgaccagcatgatcgcgccaaagccgataataaaggtcaggatgtagaagtagcccataaatccggtggcgtagaacacgctcttacgtgcttcgcgggcatcgctgaccgtaaagaagcgcatcagaatatgcggcaagcccgccgtaccaaacatcagtcctagccccaaagagagcgcggagataggatctttcaccagcccgcccggcttcatgatgtcgacacctttcgggtgtaccgccatcgcttcgctgaacagattgttgaagctaaagccgacgtgtttcatcaccataaaggccataaagctggcaccgaacagcaacagcacggctttaataatttgtacccaggtggtcgccagcatgccgccgaacaggacgtacatcatcatcagcacgccgaccagcactaccgcaatgtgatagttaaggccaaacagcagctcgatcagtttacctgcgcccaccatctgggcgataaggtaaagcgccaccaccaccagagaaccacaggccgaaagaatacgaatcggcccttgtttcagacggtaagaggccacatcggcaaaggtgtagcgaccgaggttacgcagacgttcggcaatcaggaacaaaatgatcggccagcctaccaggaagcctagcgagtaaattaagccgtcatagccggaggtaaacaccagcgcggagatccccaagaatgaggcggcggacatatagtccccggcaatcgccagcccgttctgaaaaccggtgatattgccgcctgcggtgtagtagtcattacgcgaacgtacgcgttttgacgcccagtaggtaatgccgagcgtaaacacgacgaaaatcaggaacataataatcgcctgccagttcgttggctgacgctctacggccccgctaatagcatccgcggcgttagctgcgaaagggagtgtggcggcaagcgccgtcagaactcttttcatgatgcttgtacctcatgcaggacttcgttattaagacggtcgaattcgccgttcgcccgccagatgtagataccagtgagaacaaaggagatcacaattaccccgacaccgactggaataccgcgtgtgacgctggtgttcggattcagcggggtgcccagccagccgggcgcgaaggcgatcagtaaaataaagccgatataaactgccagcataataatcgacaggatggtggcaaaccgttgccgtttttcgactaactccctgaaatgcgcattgtcttctatccgctgataaatcgtaccattcatcacagattctccagaggtaatgtagggattgttttaattcccgctcccttatgggagaaggttaacgcttgggtaacccttgccgaatgtaggccggataaggcattcacgccgcatccggcaatcaacgcctgatgcgacgctgtcgcgtcttatcaggcctacagccgttgccgaatgtaggccggataaggcgtttacgccgcatccggcaatcaacgcctgatgcgtcgctgtcgcgtcttatcaggcctacagccgttgccgaatgtaggccggataaggcgttcacgccgcatccggcaaccagcgcctgatgcgccgctgtcgcgtcttatcaggcctacaaatcgtttccgacttgttgcccggagcgcatccggcaattgtgggttacgatggcatcgcgatggcctgcttctcttcaagcagcttctcgactacgccaggatcggcaagcgtcgaggtatcgcccaggttgctggtatcgcccgccgcaattttgcgcagaatacggcgcataattttgccggagcgggttttaggcagggagtcggtccagtgcagcacgtctggcgtcgccagcgggccaatctctttacgcacccagttgcggacttctgcgtacagttctggtgacggttcctccccgtgattaagcgtgacgtaggcgtagatcgcctgacctttaatattgtgcggaataccgaccacagcggcttcggcaattttcggatgcgccaccagcgccgactcaatctctgccgtccccaggcggtgaccggagacgttcagcacgtcgtcaacgcgcccggtgatccagtaatagccatcttcatcgcgacgcgcgccgtcgccgctgaaatacatatttttgaaggtggagaagtaggtctgctcaaaacgttcgtgatcgccaaacagcgtacgcgcctgacccggccaggagtcggtgatcaccagactgccttcggtggccccctccagcgggttaccttcgttatcgaccagcgctggttgcacgccgaagaacggacgtgttgccgaaccggctttcagctcggtagcgccaggcagtggcgtgatcatgaaaccgccagtttcggtctgccaccaggtgtcgaccaccgggcatttctcgttgccgatcttcttccagtaccactcccacgcttccgggttaattggctcgcccacggaaccgagaatgcgcagcgacgaacggtcggtgccttcgatcgctttatcgccttccgccatcagcgcgcgaatcgccgtgggcgcggtatagagaatattgacctgatgcttgtccaccacctgcgccatacgggcaggcgtcggccagttcggtacgccttcaaacatcagcgtggtcgcgccgcaggccagcgggccatacagcaaataactgtgtccggtaacccagcccacatcggcggtgcaccagtagatatcgcccggatgataatcaaagacatatttaaaggtcagcgccgcgtacaccagataaccgccggtagtgtgcagcacgccttttggcttaccggtagaaccggaggtatagagaataaacagcggatcttcggcgttcatctcttccgcctggtgctgagcgctggcttgctcaaccaggtcgtgacaccacaggtcgcgcccttcctgccagtcaatttttccaccagtacgcttcagtaccaccacatgctctacgctggtgacgttcgggtttttcagcgcgtcatcaacgtttttcttcagcggaatactacgcccggcacgcacaccttcgtcggaagtgatcaccagtcgtgaactggagtcgataatgcgtccggcaacggcttccggcgagaagccgccgaaaatcaccgaatgtaccgcgccaatgcgggcgcaggccagcatcgcgaccgcggcttccggtaccatcggcatataaatcgcaactacgtcaccttttttaatgcccagttcgagcagggtattggcgaagcggcagacgtcgcggtgcagctctttatagctaatatgtttgctctggctggcgtcgtcgccttcccagatgatggcggtacgatcgccgttttcttgcagatggcggtcaaggcagtttgccgccagattcagcgtgccgtcctcgtaccatttaatggacacattaccgggggcaaaggaggtgtttttcaccttctggtacggtgtgatccagtcgagaatttttccctgttcgccccagaaggtatctggtgcgttaatagattgttgatacatcgcctcgtactgctgagggtttatcaggcaacggtctgcgatgttggcaggaatggtgtgtttgtgaatttgactcatgcttttgttctccttgtaagatgttaataatatgtggcataagcgttaaatgtaggggtattggcagttttgtttagtatttgggcgacagatcacgcaaaagtagaattgtgcaaataaacggcagggtaatttttgaaggtcagcaacaaaagttgattaattctttgaggaacatgcagttatgcatgctgttgaaaaagaggaagatactgactaactctaaagtggtattttacatgcacttacaattgattaaagacaacattcatagtgtggttatttgttacacatagggacgagcaatgtcatgacagtgtaggtgcggttactgtcgtgaaaaacaataaaaaccgccattgcaacaatggcgcaattcggatgaagccctatgacaaggataaaaataaacgcacgccgtatcttcagcttattgattccttttttctttttcacttctgttcacgctgaacaaacggctgctcccgcaacacctgtaactgtggaagcgaagaatgaaacctttgccccgcagcatcccgatcaatatctctcctggaaagctacctcggaacagtcagagcgtgttgacgccctggcggaagatccacggctggtgatcctgtgggcagggtatcccttctcgcgcgattacaacaagccgcgtggacatgcctttgctgtgaccgatgtgcgtgaaaccctgcgtaccggtgcgccgaaaaacgctgaagatggtccgctaccgatggcgtgctggagttgtaaaagcccggatgtggcgcgtctgatccagaaagacggcgaagatggctacttccacggaaaatgggcgcgcggcggcccggaaatcgtcaacaacttaggttgtgccgattgccataacaccgcctcaccagagttcgccaaaggcaaaccggagttaaccctttcccgtccgtatgcggctcgcgcgatggaagccattggtaaacctttcgagaaagccggacgtttcgaccagcaatcgatggtttgcggtcagtgccatgtggagtattacttcgacggcaaaaacaaagcggttaaattcccgtgggatgacggcatgaaagtcgaaaatatggagcagtattacgacaaaattgccttctctgactggactaactccctgtcgaaaacgccaatgctgaaagcgcagcacccggaatatgaaacctggacagcgggcattcacggcaaaaacaacgtgacctgtatcgattgccatatgccaaaagtgcagaacgccgaaggcaaactctacaccgaccataaaattggtaatccgtttgataacttcgcccagacttgtgcgaactgccatacccaggacaaagctgccttgcagaaagtggtcgcggaacgtaagcagtcgattaacgacctgaaaatcaaggttgaagatcaactggttcacgctcacttcgaagcgaaagcggcgctggatgcaggtgcaacggaagccgaaatgaagccgattcaggacgatatccgtcatgcccagtggcgttgggatttggcgatcgcttcccacggcattcatatgcacgcaccggaagaaggtctgaggatgctcggtacggcgatggataaagcggcggatgcacgcaccaaactggcgcgcctgctggcgaccaaaggcattacccatgaaatccagatcccggatatctcgaccaaagagaaagcccagcaggccattggcctgaacatggagcaaatcaaggccgagaagcaggacttcatcaaaacggtgatcccgcagtgggaagagcaggcacgtaaaaacggtctgttaagccaataaccccgttccgcctcgcaaggggcggaaaacacaatggagtgaatatgagcgtattacgttcgttattaactgccggggtgctggcgtcgggcctgttgtggagcctgaacggaattaccgctacccctgcggcgcaggcatctgatgatcgctacgaagttacccagcagcgtaacccggatgccgcctgtctggactgtcataagccagataccgaaggtatgcatggcaaacatgcttctgttatcaacccgaataacaaactgccggtcacctgcaccaactgccacggtcagccatcaccgcaacaccgcgaaggggtgaaagatgtgatgcgctttaacgagccgatgtacaaggttggagagcagaacagcgtctgtatgtcctgccatctgccggaacagttgcaaaaagccttctggccgcacgatgtccacgtaaccaaagtggcgtgcgccagctgccattccctgcatccacagcaagatacgatgcagacgttaagtgacaaaggacggattaagatttgcgtcgattgccacagcgatcagcgcaccaatccgaactttaacccggcgtctgttccgttgcttaaggagcagccatgacctggtctcgtcgccagtttctcaccggcgtcggcgtgctggcagccgtcagcggcaccgcaggacgcgtggtggcgaaaacgttgaatatcaatggggtgcgttacggcatggtgcatgacgagtcgttatgcatcggctgtaccgcctgtatggatgcttgtcgggaagtgaacaaggtgccggaaggcgtctcgcgcctgacgattattcgtagcgagccgcagggcgaatttcctgatgtgaaatatcgcttcttccgtaagtcttgccagcactgcgatcatgcgccgtgcgttgacgtttgcccgaccggtgcgtcttttcgcgacgctgccagtgggattgtcgatgttaatccggatctctgcgtcggttgtcagtactgcatcgccgcctgtccgtaccgcgtgcgctttatccatccggtcacgaagacggcggacaaatgcgatttctgccgtaagacccatttgcaggccggtaagctgcccgcgtgcgttgaggcttgcccgacgaaggcgctgacgtttggcaatctggacgatcccagcagtgagatttcgcaactgctgcgccagaagcccacttaccgctacaagctggcgctgggaaccaaaccgaagctgtaccgcgtaccgtttaaatacggggaggtgagccaatgacgcagacttccgcatttcattttgaatcgctggtgtgggactggccgattgccatctacctgtttttgattggtatttctgccggtctggtgacgctggccgtgctgttacgtcgtgtctacccgcaggcgggcggtgcagacagtacgttgttgcgcaccacgctgattgtcgggcctggcgcggtgatcctcggtctgttgatcctcgtcttccacctgacaagaccgtggaccttctggaagctgatgttccactacagttttacctcggtgatgtcgatgggggtgatgctgtttcagctttacatggtggtgctggtgctgtggctggcgaaaatctttgaacatgatttgcttgccctgcaacaacgctggttgccgaagctggggatcgtgcaaaaggtcttgagcctgctgacgcccgttcatcgcggactggaaacattgatgctggtgctggcggtgttgttgggggcttataccggctttctgctgtcggcgctgaaatcgtatccgttcctcaataacccgatcctgccggtgctgttcctcttctccggcatctcgtctggtgcggcggtggcgctgatcgccatggcgatacgccaacgcagtaacccgcattccacggaagcgcactttgtacaccgtatggaaatccccgtggtatggggtgaaatcttcctgctggtggcgttttttgtcggtctggcgctgggcgatgacggtaaagtgcgtgcgctggtggcggcattgggcggcggtttctggacgtggtggttctggcttggtgtcgccgggctggggctgattgtgccaatgttgctcaaaccgtgggtcaatcgcagttccggcattcctgccgtgctggcggcatgtggggccagcctggtcggcgtgttgatgctgcgctttttcattctctacgccgggcagttaacggtggcgtaagccagaacagaggtggtttctggacgtattccttcctgaagtcagttttctggcgttgttgttaagtctcggggtcaacgtgttgaccccgttgacggccttcgcgggagtgcggttgcgctggcctgccatgatgcgactcacttgcatcggcattctggcgcagttcgcgctcctgctgctcgcctttggcgtactgacgtattgttttctcatcagcgatttctcggtcatttatgtcgcccaacatagctatagcctgctgtcgtgggaactcaaactggcggcggtgtggggcggtcatgaaggttcgctgctgctttgggtgctgctgctttccgcctggagcgcgctgtttgcctggcattatcgacagcaaaccgatccgctatttccgctgacgctagccgttttatctctcatgctcgccacactgctactgtttgtggtgctgtggtccgatcccttcgtgcggatatttccaccagcaatcgaaggccgcgatctcaatccgatgctgcaacatcccggtcttatctttcatccaccgctgctttatctcggctacggcggtttgatggtggcggcgagcgtggcactggcgagtttactgcgcggcgagcttgatggtgccagcgcccgaatttgctggcgttgggcactacctggctggagcgcattaacggcggggatcatcctcggttcctggtgggcctattgcgaactgggctggggcggctggtggttctgggatccggtggaaaacgcgtcgttattaccctggctttctgccacagcgctgctgcacagtttatccctgacacgccagcgggggattttccgccactggtcgctgttgctggcgatagtaactctgatgctgtcgctgctgggcaccttaattgtccgttctggcattctggtttcggttcatgcgttcgcgctggataacgtccgcgccgtgccgttgttcagcctgtttgcactgattagccttgcgtctctggctctgtatggctggcgagcgcgggacggtggcccggcggtgcgtttttcggggttatcgcgggaaatgttaatcctcgctacgctgttgctgttttgcgcagtgctactgatcgtgctggtgggaacgctttatccgatgatttacggcctgctgggctggggacgcctctccgttggcgcgccgtattttaaccgcgcgacgttaccgtttgctctgttgatgctggtggtgattgtgctggcgacgtttgtctctggcaaacgtgctcagcttccggcgctgctggcgcatgcgggcgtgctgttatttgccgcggggatcgtggtttccagcgtcagccgtcaggagatcagcctgaatttacagccgggtcagcaggtgacgctggcaggatacaccttccgttttgagcgcctcgatctgcaagccaaaggcaattacaccagcgaaaaagcgatagtggcactgtttgaccatcagcaacgcattggtgaattaacgccggagcggcgtttttacgaagcacgtcgtcagcaaatgatggaaccgtcaattcgctggaatggcatccatgactggtatgcggtcatgggcgagaaaaccggagcggatcgttacgcttttcgtttgtatgtacaaagcggtgtgcgctggatctgggggggaggattgttgatgattgcgggcgcattgttaagcggatggcggggaaggaagcgcgatgaataaagggcttctcacgctactgctgttatttacctgttttgcgcgcgctcaggttgtagacacctggcaattcgccaatccgcaacaacagcaacaggcgttaaatattgccagccagttacgttgtccgcagtgccagaatcagaacttactggaatccaatgcgccggtggcagtcagtatgcgccatcaggtttacaccatggtggaagaggggaaaagtgaagtcgaaatcattgactggatgaccgaacgctacggagattttgttcgctataacccaccgttaacgggtcagacgctggtgttgtgggcgctgccagtagtgttgttactgctgatggcactgatcctctggcgagtgagggcgaagcgatgaaacagccccaaataccggtgaaaatgctgacaacactcacgattttgatggtatttctctgtgtcggcagttatctgttaagtccaaaatggcaggcggtacgtgcggagtatcagcgtcagcgcgatccgctgcatcagtttgccagccagcaaaccccggaagcgcagcttcaggcattgcaggataaaatccgtgctaatccacaaaacagcgaacagtgggcgttactgggcgagtattatctgtggcaaaacgattacagcaattcgctgctggcgtaccgtcaggcgttgcaactacgtggtgagaacgctgaactgtatgcggcgctggcgacggtgctgtattaccaggccagccaacatatgaccgtccagactcgcgcaatgatcgacagagccctcgcgctggactctaacgaaatcaccgctctgatgctgctggcttccgatgcgtttatgcaggcgaactacgcgcaagccatcgaactatggcaaaaagtgatggatctcaactcaccccggatcaaccggacacagctggtcgagtcgattaatatggcgaaattgttgcagcggagatcagattaatcatctggtgatgaagattatgttattgagctgcataaaaaataatcgaatgaacatataatcaaaaataatcaccaatcagtattattgcagattaaacaaataaaaatccttctataacaaatggttattcattaatcctgccataaactcgcgttattatgcattaatgcagcgaaaagctctgttgttaaagggttgcgcaacataccgcgcaaatgatactgatcataagcgttaaaaaaatctacaaaccaacgcaacacaattcatgccctggcagtatgtcacgttctcgcgtttctgaacggggaacggcgctccattgaggaagttattctgatgaaaaatataaaattcagcctggcctggcagattctgtttgctatggtgctgggcattctcctgggaagctacctgcactaccatagcgacagccgcgactggctggtcgtcaatttgctctctccggcgggtgatatcttcatccatctgatcaaaatgattgttgtgccgattgtgatctccacactggtggtgggtatcgcgggtgttggtgatgccaaacagctcgggcgtattggtgcgaaaaccattatctacttcgaggtgatcaccaccgtcgccatcattttggggatcactctggcgaacgtcttccagcccggtgccggggtggatatgtcgcagctggcgaccgtcgatatctcgaaatatcagagcactacggaagcggtacaaagcagttcccacggcattatgggcacgattttgtcgctggtgccgacgaacatcgtggcgtcgatggcgaaaggcgaaatgctgccgatcatcttcttctcggtgctgtttggtctggggctttcatccctgcccgcgacgcatcgtgaaccgctggtgaccgttttccgctccatctctgaaaccatgtttaaagtgactcacatggtgatgcgttatgcgccggtgggtgtgtttgcgctgattgcggtgacggtggctaactttggtttctcgtctctgtggccactggcgaaactggtgctgctggtgcatttcgccattctgttcttcgcgctggtagtgctgggaattgtggcgcgcctgtgcgggttaagcgtctggatcctgattcgtattctgaaagatgagctgattctggcgtactccactgccagctctgaaagcgtgctgccgcgaattattgagaagatggaagcctacggagcaccggcgtcgatcaccagtttcgtggtgccgaccggttactcttttaaccttgatggttcgacgctgtatcaaagtattgccgctattttcatcgctcagctgtatggcattgacctgtccatctggcaggaaatcattctggtgctgacgctgatggtgacctcgaaagggattgctggcgtgccgggcgtgtcgtttgtggtgttgctggcaacgctgggtagcgtaggtattccgctggaaggtctggcgtttattgccggtgttgaccgtatcctcgatatggcgcgtactgcgctgaacgtggtgggtaatgcgctggcggtgctggtgattgccaagtgggaacacaaatttgaccgtaagaaagcgctggcttatgagcgtgaagtgctgggcaaatttgataaaacggcggatcagtaattgaagattgccggggggatatccacccggcaatgtgtggatgcctgactgagtaatagcctgatgtagcgtgatttttgtaggtcggataaggcgtttacgccgcatccgacatcaacgcctgatgcgacgcttgccgcgtcttatcaggcctacgtcagacagcgcaatagcctgatgtagcgtgattttgtaggtcggataaggcgtttacgccgcatccgacatcaacgcctgatgcgacgcttgccgcgtcttatcaggcctacgccagacagcgtaatagcctgatgtagcgtgattttgtaggtcggataaggcgtttacgccgcatccgacatcaacgcctgatgcgacgcttgccgcgtcttatcaggcctacgccagacagcgcaatagcctgatgtagcgtgattttgtaggtcggataaggcgtttacgccgcatccgacatcaacgcctgatgcgacgcttgccgcgtcttatcaggcctacgccagacagcgtaatagcctgatgtagcgtggtttttgtaggtcggataaggcgtttacgccgcatccgacatcaacgcctgatgcgacgcttgccgcgtcttatcaggcctacgccagacagcgcaatagcctgatgtagcgtgattttgtaggtcggataaggcgtttacgccgcatccggcatcaatgtctgatgcgacggttgccgcgtcttatcaggcctacgccagacagcgcaatagcctgatttggcgtgatttttgtaggtcggataaggcgtttacgccgcatccgacatcaatgcctgatgcgacgtttgctgcgcctaccttaaccgttagttaatttttcaaactcttcacaaccggtatcaaacccttccatacagctcaggttcaaccagtgcagcgccttttgtttgttcttctcgataaaaccctcttcaccgtttaagaacatcattcccgcccagtattcggaataaccggttcgggaaatcgcagagctgcgtttgaaataccaggttgctttgtcatcgtcggccttaatgcccacgccgttggcgtaaatcaaaccaagcagcatttgggcatcgacggcagagtcgttctccagatcttccgaggcgttttctaacagcgaaatcgcctttggataatccggtttacccgcttgcgtatttaccagaatatgcgccagcgttacttcaccttctttactgcccgcttgcgctgctttctcggcaagcacttttgcttgtggatagtccagactgaccggattggtgattttgatctgcgccaacagcgcgcaggcatcggcatcaccgctgtcggcggctttctgtgcccaatattcggctttgctcaaatcgccggagctaaaccagctgtcggcaagaaaatattgtgcgcgtcggtctccggcctctgctgcctttaaatactggctgccaggctcggagtcgttcgcgtgggcaaagaatgtcaaaaacaacatcaaagtgataatttttttcattttgataatgaagtttggtaggggagagacagtataaagtgttcgggtggacaaaaaaacaactgtaaaaagacctgaaagcagaatgaattaatgcaatgtcaggttttttaatccatccgatgttcccccttttccatggcgtcgcgatcaaaaaatcgctgaatttttccctcggacatcaatgccgctcgatcagacatatgcgcgatgacatcggcatcgtgactgaccagcagatatgtcatttggtgttccagcttaagttgattcaacaaattaaggatttccgcttgtaccgacatatccaacgccgaggtgggttcatccagcagaagaagttgtggtcgtaacaacagggcgcgagcaataaccacacgttgccgttgaccaccggaaagctggtgtgggtagcgacgagcggcgtcgaaaggcaagccaacctgttccagtgcagtctggacgcgtttttctatttctctttcgccacgaattttgagtggttcagccagcgttcgccacagagtatgattgggatgcaacgaggcatagggatcctgaaacaccatttgcacattgcggcggagatcgccctgaaaacgcattcctggtttgatggtgtgcccaaacagtgacacctgaccgtgccagtcgcgctgtaatccagcaattacgcgcaaaatcgtggattttccgcagcctgattcgccaattaaactaaatgtctctccggcattaaccgaaaaactggcggcagaaactgcggttttctcagcaaaagtcacctgtaagtgattaatttcaacaatcgtcatggtatttctccggcgtcattgccgtcctgtccagcgtcggcagcatctgcccgtaagtttgtgcatttgggcggcaagtccacagtgtgcgcgtgtaaggatgcgttgctgtaggtagcgcagcagcgtgcatttcatccaccttatttccctgatacatcaccagcacccgatggcaaaattgggcaactaatggcaggtcgtgactgatcagcaacattgccatctgacgttgttcacactgggtaaccagcagttccagaatctgattacgcaggcgcacatccagtgctgatgttggctcatcggcaatcaatacccggggatcgttgatgagcgcaattgcaatcatcactcgctgccccatgccgccagaaagttcacgaggatagctttgcagtactcgcgtattgaggccgacagcctgaattgcggtgtttattttctcttctttctcgcggcggttcagacgttgatggagcgtaagcgcctcttccagttgcgcttttactgtctttactggattaagcgcgtaacgcggatcttgcaataccatcgcgatatcgttaccgcgcaactgttgccatccacgcgcgttaagggtgagtgcatcacgccccagaatgttaagtgtgtccgcggttactacacccggtttacgcaccagccccatcagggcgcgggcggtcatggacttacctgaacccgactcaccgaccagcgccagacgttcattgcctaatgtaaaactgacattgttgacgacccgggactccggataatcgacgcagagattgttgatactaagacgtgagtcagtcatgttgaggctccagaacatcgcgcaagccatcacccagcagattaaaggccagactggcaattaagataattgcgccgggagcggcggcaatccaccattgatcaaaaatgacctgcataccgtcggcgatcatggctccccattccgccattggcgggcgagcaccaagcccaagaaaacccaggccagcagccgccagaatgatacccgctaaatccagcgccagacggacaatggcagatggcaggcacaatggcaaaatatgaccagccagcagacgcctgccgcggatgcccatcatttctgcggcggcaagataatcactgtgtcgcagacgttggatctcactccgtgcctgacgcgcataagcaggccaggtggttaatgccagcgccagtgcgccgttaaccagccccggccccagcatggcaacaaaagcaaaagccagaattaaacgcggcattgacattactacgtcagtaaaacgcatcagcacgcgttccagccagccgccgtagtacccggctaaaatgccaatcagcagaccgaccgggagtgtaatgattgtcaccaatgccaccagccccagtgccggacggctgccgtagattaaacgtgaaagtaggtctcgcccgtaactgtcagtgccgagccagtgctgacgactcggtgcttgtaaccgcgccgccgcatcctgccagttaggatcgtgaggtgccagccacggcgcgaagagcgcaattagcatcaataacaggataattatcaacccgcaaaacgcggcgggtgaatggcgtaaacggcgtaaaaagagaaacatcggcatcagcgtaacctcggatcggtcagccggaccagcaggtcggttaagttatttatcaacacaaagcagacgccaatcagcagcgttcctcccatgattgctgtggtatcacccgcgaagagcgctgtagtgaggtagcgcccaatacctggccatgaaaagacggtttctgtcagtaccgcgccttccagcattgatgtataggcgagggcgataacagtgagcaaggtgccgcgaatgttgggtaaaacatgacgtagcaaaattgtcatctcgctggctcctttggcgcgcgccagcagaatatattctttattcatttcgccaagacaggcggaacgagtcaggcgcgtaatactggcgagcgagaagtacgccagtaataaaaccggaagtatcaaatggttgattgcattggtaaatgcctcgcgatcgccagaaagccacgtatcaatcagcgcaaatccgctgcggggttctatggtgaattgataaatatcatccagcctgcccggcccggcactccattgcagtctggcgtagaacagcgccagcatcagcagaccaagccaaaaaacagggacggaatttcccagtagagttaatgttcgcacggtgaaatccagcggagaaccgacataacgggcgcaaagtacacccgcaatgacgccgacaacagcaccgacaataagcgccaacgttgccagttcaatggtcgccgggaatgctgatagcaagtcctgaagtactggttgcccggtggagctggcgatgcccagatcgccgtgtgccagattcatcaggtaatgccagaactggacggctaacggctgatccaatcctaactggtggcgtacctgatcataggtggactggctggcgtgatcgccaacgatttgtagtacgcgatcgaccggtgagagagccgaaagcgcaaaggtaatcagcagcaggccgagtagcgtcagagcaacggtaaacagcccttgcaacagcgcgagcagagggcgcttgcctcgccatctcgcgcgagtggaaaaaacgacagacatgatctttccatacagtgataaatcagcggctggcctgcaatacaggccagccctggtaccgcgcccggtaacatggctggacgcgagttgcatacagggttatttggttacctgatcaaaccagaccatatcggcattcaacccttgttgatacccctgcacattatcacgcatgacaatttgcgttttgccttgatcaataaagacatacggggaactacgttgtagttcttgttgcattttcttatacaaatcaagacgtttagtgctatcaggttcagcgatggccgccagcgtttctttgttcagttccgggattttccagccgtttaacccggcaacggtgctggatttgccatcgttataggcgaaagagctggcgttggaatgtgcgtcaaaataatcaggcaaccacatacgaatggccccctgatgctggtgggcgcgaacgcgagagtagacctgactccctgcggctggcagcaaatcaacttttacaccgccctgagcaaagctggcctgaattgactgcgcgatggtaataaatggcggtttattttcgacatcaagcgtgaagtgcgggtctttgattccggctttagcgaggatctcttttgctttggctggattaaaggtaaacggtgtttcttccagtgctccaggaaagcccacgggcaggaaactttgatgggtaaaatattgtccttttaagagatttttggtgatgccgtcgtaatcgaccaaccagcgagcggcctcccagaacgcaggattactcatcagcgggttatccttgttaccggtattgaaggccaggtagttctgttcggcggaggcaatgctcatcacttttacgccaggtttaccctgtaatgcatcgatttgatcggctcccagatcacgagccatatcagcatcaccttgttggatcagcaggcgacgcgttgccggatcgggaacatttttgatgatgacgtttttcagtttcggggcgccggttggtgagctggcgttggcttccatcacgatggcctgatgcggttggtaagtacgcattttaaacgcgccgctgccagcggaatgcatcttcagccattcattaccaaagtcgttatttttggcgtttggcgcaaccagcttctcgtcaacaattgaggcgattggtgtggagagaatattcagtgccagcgccgggctgacgtcggcactccattgcacctggacggtatggtcatcgattttcttcaactggctggcgatattttctggctgccatcccagcacattgagaataaacgcaccggatttattcagtgtgacagcccggacataagagtaaatcacatcttccgggcgtaccggattaccagaggcaaatttcgcatcgcttttcagttttatggttagcgttttggctgcggggtcagcctgccaactttccgccagaatcggagtgattttcgtcggatcattacggtccggttgtactacgcgttgatacagacttggtacagtctgaatacttgagagttcattagcttctgccgggtccagactcacaatatcatccagcccctgggctacaaccaacgtattaggcggtgtagcggcaacggttgtggcggaaattgtgcttaaaaccagtaaaggtaatagttttttaatcatatgcttcccaatccctgaaattactttgaggttattaatatgctatcagacggggtttcgctgcattaatcgcgccagaatatcccgttaatagaacgagttaaatggtcgatgatttctcaccttaccgaaattttgtttatcaaatgtaaagtattattacgttaggccgcgatgagaattgagtaaagataattctcatttgcaatcgtgactggaatagaagaacaaccgagaagacgtcgctaataaccaggatgggctggtttgactgcgcaggtatgtataaaaaaatccggaaacagagagtcgtttccggattgatacaaaggcgttgggtaatatcgccgcttttaacgtgagtttacgcggtattacgccagtgccgcttcgcgcaggcgagttttcaacttgttgtactcgtcaatcacgtactgctcggcggcgcgctgatcggcgatcggctcgacgcgcacggcgcagtatttgtattccggcgttttcgtaatcgggcttaagttttcggtcaccagctcgttacaggcaccaatccaccactggtaggtcatgtaaatcgcccctttgttcggacgatcgctgacctgcgcacgggtgataattttgcctttacgcgagtgcacccaaaccaatgcctcatcttcaatacccagacgtttggcgtcttcggtattgatttgtgcgtagccaggttcatcagccagcgccgccagtgccgcacagttaccggtcatcgaacggcaagagtagtgaccaacttcacgcaccgttgacagtaccatcgggtactcgtcggtgagtttgtcgattggcgctacccagtcgcaggtgaagaactgcgccagaccgttcggggtatcaaacttctctttaaacagataagaagtcccctgatcggcatctgaagtatcgcggcaaggccactgaatgaagcccagttcgcccattttctcgtaagtcgcaccgtagaaatccgggcacagatgacgcaactcgtcccagatctcctgggtgttgttgtagtgcatcggataacccatacgagtggcaatttcactgatgatttgccagtccgttttcagatcccacttcggctcaaccgccttgaagaaacgctggaagccacggtcagccgcagtaaacacgccttcatgctcgccccacgacgttgacggtaaaatgacatccgccgccgacgcggttttggtcataaagatgtcctgaacgataaccagttccagatcttcaaaggctttacgtactgccgacagttccgcgtcagtttgcagcggatcttcgcccataatgtacgccgctctcacttcaccatgcgccacgcggtgcggcagctcgctgatgcgatagccggtatgagcaggcaggctttccacgccccaggctttggcgaatttctcgcggttagccggatctttcacgtactgatagcccggatacgtatccggcagcgcgcccatatcgcaggcaccctgcacgttgttctgaccacgaaccgggtttacacccgcatgtggcttaccgaggttaccggtcagcatcgcgaggctggtcagagaacgcacggtttccacgccctgatagaactgggttacccccatgccccacaggatggcggcgctttctgcctgggcatacatccgcgccgcctgacgaatctcactggcgctgacgccggtgatatcttcaaccgactccggcgtgtagccttcaacgattttacgatactcttcaaagccttctgtacgggaagcgacgaacgccttgtcgtacagattttcttcaataatgacatggcccatcgcattcaacagcgcgatgttcgagccgtttttcaatgcaatgtgcatgtcagcaatgcgcgcggtttcaattttacgcggatcgcagacgataattttcgccccgttacgtttagcgttaattacgtgattcgccacgattgggtgggaatccgccgggttatacccgaaaacgaacactaaatcggtattatcaatttcgttaatagcattgctcattgcgccattaccgaccgattggtgcagacctgcaaccgatgggccgtgtcagacacgagcgcagcagtcaacgttattggtaccaataacggcgcgcgcaaatttttgcattacatagttggtttcgttacccgtaccgcgcgaggagccggtcgtctggatggcatccggaccgtacttctctttgatggcgctcaggcgctcggcaacgtaattcagtgcctcatcccaggaaacaggttcgagtttgccgccacgctggcgacggatcatgggggttttcaggcgcggggtcaggatctgggtatcgttaatgaagtcccagccataataacccttcagacacagggtaccctggttggttttcccctgcgctgcctccgcccggacgattttgccgttatcgacgaccaggttgattttgcaacctgatgcgcaataggggcaaaccgtgacgacttttttcatcggtctcgctccagttaatcaaatcacgcatacgcgctctcgactacagtatgcatcttttatgccacattttatttggggtcattccctgatattacgggcactatttattcaaaactctgacgaaaaacaggctgtcgtcagttttgacgtgacgaaacgaaataccgcgtgacagccatcacgcggtagacattttattttttctcgacgatgggagccgcctgatacccgccgcccagcgatttcatcaactgaatgctttggatcacccggcggctgtccagcatcagtaatgacatctcttcggcaagcactggcaaccgggcttcggtggcctgtaagcggctggttaagccgcgctgataggcggcctcggctgcgcgctgggtgaagcgcgttgcttctacgcgttcagcctgcatctctcgctcgtcgttgagcgtttgcagacgtgtgccgttgacggcaacgtcacgcaccgcgttcagtactgactggttgtaacgttcaatcatcatgttgctggcggcgcgagtgccttcgagattggcattcaaccgtccaccgtcaaacagcggcaatttcagacccgggatgaagttgaactggcgactggtttttttgaataaggtatccaggtggatggagtccagaccgaaaaacgctttgatatcaaagctcgggtagaacagcgcccgcgcggaatccacctgatctaatgacgcctgaacataccagcgcatggcttgcagatccgggcgtctggcgagcaactcataagagagcgttgccggaatgccggtctgtactcgtggtaatgccaccggtttgatctccggcatatcgctggctcccgcgccaatcaatgcacgcagagattctcgcgtttcagtgatttgccctttgacggcagcaatttgtttatcgaccgccagaatctgtgcccgcgcgccgtggaaaggcacttgcgcttccagaccgtgcgccactttactctggtgcgctttcaccgcgtaatcaatcacatcgcgagtttgttctaacagatcgagcatctgatagctggcctgcatactgtaataaagctgcgctacgcccgtggtcagcgatagctctactgctgcggtttctgccagcgcggcattatgcgcgccaatggcggcagcaaccgctgagcgatgcacaccccacaaatcgagatccagtccggcaaacaaaccgactgtggcttccgtatagtacggcccgtccatacccagtgctggcgcatccatcgcataagggcttaaaaagccgttcgccgagacgcgttggcggttgagcatccctaacgctgcgacctgtaattgtgaaccggcatctaacaaatcggcctgggactgcgctttttcttcccgcagtttcgcttcggcgagggggtgtgaaccacttagcgtccgttggatcagcgaatccagctgcgggtcattgagttgtttccaccactgcgcctgcggccagccggagctggcaagatgaatatcatcggccagtttgatttgctccggtttgagctgttgatgaggcgcagaatccttacgtaccagggcacagccggaaatcagcgtcgtgctgccgagaatgctgcacaacagcagacgtgaaagttgacgattgatcattgcgtggctccttgtgcctgttccgtggcgggcgttaatgccggggctgtccagtctggcaagcgggcgaaaagctggcagacgtgttgctcctgttttaataaggtgggcagaatggcctgcgaggcggatgtctcttctaacgttatttgaggagaatgactgagtgcggtagccacaccggcagcgtatttctccagggcgtcggcaaactgacctgctctgtccggctgtagtgcgttatccagcgcctgcgccgagttccaggtggcatcccaggcgtgaagaatatcgcggccctgacgaataaccgtttgcgaacgttcaatcagtaatgcgcgttcttcgctgtccagttgacgctccagcaccacgcgttggcacatctcttcacaggcattaaacgccgcatgcagacctatgcgaatgtgcagataagtgcgcagagccgtgacttcctgctggcgtgggatccgcattactttactcaacatacccagcgcgccagccagtttttgcggcagcgtgcgcgcttcgctttcaggccagacaaaggtgtaaatcaccgccgacaccacggtaccaatgatgatacccagagcgcgatcgcgaatttccaccaggtcgtacaccgggccaaaaacgttttcgagcgtggcgagcgcgaaggtgaccaccatctgtgtgccgatataagaagagcgttcagagctggtggcaatccatgcgcccaacaggaaaatcggtgccagcacaaacagcaattcgacaatattgtccagccagggcatgaccagtagcgtgaataacagcgccagaatcgcgccgcaaaaggccccaccaaaacgcagcaccatcttctggtacgacgaaccgacatttggattagcgacgatcacgcaggtcagcatacaggtatgaatgccttcccagtccacgccgctgtagaaggtgtaacagatcaaacaggcgagcagcgtttttaccgcgtagcgcatatagtctggattggtaaaagcatcggcgaccattgatggcggtttggctgcgggcgttggcggcgtattcgggtccatctgaccaagctgtaacagcgtctggcagatattctccaggttacattcccgtgccgtcatcgcttcactttcactgatccgccagtcgctttgccagcactgaccttcggtaatggaatgctgcagcttgttgatttctgaagctaatttttgtcggaattcaataattgcctgagaatcagcaaaagaggtgggatcgtagcgattcagtgtcgagtaaatgtaggttaccgttgccacgcagctttgccaccatgcgctctgggttcgccagttggcatcgtccgcgaggcaaaagacattgagtttttgcagcgccagcgcctctctttcaatccgcgtttcgggtagcggtgcgaggctgtccgtcaggtggctaatggcatcatcaagccgatcattaagcgcctgatgcatctgcgtaatggcacgactgggaaaccacagcacgccgattaacgtcatcagcaaggttggatagaggccaacaacgatacaccacagcgttaagcgcacgaccgcttccggatagtcgagcatggcggggaaggtttgcccgtaaatagcgacaatggcgacggcgaaaaagaccagccccaaccgatgggtgcgcatcaaaaacatacagctcatcaggatcggcccggcaatgatcaatcggatcaacggttcgccatatgaccatttgtagatcaaaaacaggctggcgatctccagcaccgtggcgaccacaaacaagatcgccacaaatttggtgtaaaacgcgttcgactgaataccgtaaaacagcactgccagtgataacgccacaaaagggatctcaaaagtcatcgagatcagaatcaccagcaggcagcctacccagagttgcatagtctgtggcacgcgccctggtcgccgctcgcttaactcttcatgaaagaacgccagcagcctgaccaccggtaatggcagggagttgagcgcgctcattattgcggctcaagattagcgactgccgaagcgccgatgcggaacatttccgggtcaggtttatcgaccatgattttgaccggaaaacgctgggcaacgcggacccagttaatagaacgagacactttcggcaggccgcccagcaccaggccgccgtcatccggtagcacgccgtagccaatcgaatccactttaccctcgaaggttttgccgctgtcgctcatcaggcgaatggttgcgggtgtacccgagcgaatatttttcagatcagtttcgcggaagttggcaatcacgtaccagtgacgagtgtcgattagagtgaaaatagggcgcatcgcagatgcaaactgcccgacggaggttttgagggaaatgacccggccatcaaacggcgcgcgaacggtcgccatttccagatgcagtttggtcagggcaatatccgcttccactgccgcacgctgcgccaccagcgcatccacgccgctgacggcgctggcggctgactgcgcctgcaacaatacggcattaaggtccgcttctgccgcacgctgtgcggttcttgcacggtcaacctcttccgcagaaacaaaaccttctcgcagtagcggttcggtacggcgtaacgtatcgctggcttgtttcgcggcggcacgggctttttctaccgtggcattaaccgagtcggcaccaaactgttgtgcgtcaacgctacgctgggtgagcataatttgcttatccagcgccgcgagggaggcttcagctttcgccagattggcttcgtacgggcgcggatcaatgcggaacagcaaatcgccctgtttcaccgcctggttgtcggtgaccgccagttctacaatgcgaccgctgacttccggcaccacatcaatggtatctgctgacgcgtaagcgtcattagttgatggcgcactgtctacgcgccagataacgaaaacaagggcaaccagcgccaacgcaaccactaacagagcagggaatttactgcgaggagcttttttcggcgtactttccatgagcgcgtctcaaatagattagaaaaatgccagccagaacagcatggcgtagagagcaaaaagggcggtataaataattccgacaaatgccagattgatatttgtccgctgaataattcgcctcgtgatgagcgtcaaaataaggctggcaatagcgcagaaaaaccagccgggataataagcgccgatcaccgggatcgccggagataatgagcatcccgataccatgaagacgggaattatccaggctgtctttttgagttgcatcgccatgcgagagagaactgttggcatattaaatacatcctgtctgctgcgaacaatatctgtagtgaatatcaatatccattgaaggcgtcagtatggctattttcttgatgaataaaaatagctttattcagccaccgcattcataacttatatatttcatgtattaatttgctgtatatatttttaaaataaatgcttttgggggcttcagcgcccccaaaagcgagtgacattaatttggggttacgatattcacccacaaatcgaaattatccagacaggcgataatttcttccagtttcgcgccattgccaataattttggctttcttcgctttcaccagatcggccatttttgcctgtccggtcagcacggcgtgcagatcttcacggctgatgtagaaagaggcgtcagcttgcggttgcagtgttttacggtagttaagcacgctatcgttcagcgtcaggttgaggttatcgccgttgctcatattgaagttcaggctgatatttttacccgcggctttcgcgctatcgaggcgaacggacataaagtcgaacagcatttcgaccgacatcccacgaatggtgtccggggaaccggtggtgccgtggctgaacttatgcaccccttcgcgcagctctttcgcgccggtcaggtagaaaccgcgccatgtggcggactcggcctgatagcccagctgttcaaagttattcgcttgcagattcttcgcgacctggtcacccgggttggcagcaatcacctgtttcagcagttctgccgaccagcgataatcaccttgcttgttcgcttcttgcgccaggttgatgacgcgggcagaaccgcccagcgcctgcacgtaacgtttacccatctccacctgaccatacggatgcaggttagccgggttaccgtcgtaatagccaagatagaagttatataccgcgcgggcgttgtggctgacagaaccgtaatagccgcggctggcccagttattggcaagcgcaggcggcagcttaatcatgtcgccgatttcattcatggtgtagccctggttcgccaggtgcagggtctggtcgtgaatgtacttgatagtatcgcgatatttaccaatataatcattgatatgcttattgccccaaaccggccaggtgtgcggcataaacagtacttccgcgtcgttaccccacatatccaatgtttcgttcagatactcggtccacttgctggtgtcgcgggttttcgcgccgcgcagggtgtagaagttgtgcagggtatgcgtggcattctcggcggtacacagggctttcagggccggaatatagaagtgcatttccgctggcgcttcgctacctggggtcatcaggaagtcaaactccaggccgtcgataatcatcttctcgccagttctcacgatagttttagtcggtgcaataatgctcgggtcgcccgttgccagcgtcacgccaaggccattacccacattgccttgcgcgttgtgcggcagtaacagaccgtaagagtagagcgcacggcggctcatgatgttacccgccagcacgttttcgctgatggcttcgtccataaagccagctggagcaatcacctgaacttttccggatttaacatcggcttcagagatgatgcctttcacgccgccatagtggtcggcgtggctgtgggtatagataacggcaataatgggtttttgcgggcgatgctggaagtaaaggtcaagtgcggcttttgcggcaggtggcgtcaccagtgggtcaataacaataatgcctttctcgccctcaacgaacgtaatgttagagatatcctggccgcgcacctgatacattttatcggtgactttgaacaggcctgaaatgccgttgatctgcgactgacgccacaggctggggtttacggtttccggcgcagcggcattaatatcaaatttgtaatcattcgcgcggtagtaaattttaccgttcgcatcacgcagaataccttcatccagcagcggagcgataaatccacgctgggcatcgtcaaaatcctgacgatcgctaaacggtaatgatttggcgtaattctgattaacctgttgggtatattgagtggcggctttcgcttcatctgttgcgtaagcggtatttatcatcatgccgctggcggcagtgaacgcaataacaatcctgctcaaacggaataaccgagagttattcatataaatctccatttatcatttatgtcgtaaatatgtaatccatgcaaaatacgtcatttaaagctggcgttatcataattctgaaattgcgactttaataagtggaagtgtgagcggaacgagccattttattaggcatttgtgctgaagagggaaaattacagtagaactatcattgctgggaataatatgggctgttttatgtaattattatatatattgtacctgtcgttggcacagcgggatattgcgctactgtgccaacgctttactcatgggactttagcacaggactgtagcaaaaaacgttgatgcgccaatattgctgcaccctgagcgccattaaagtcagaagatgaggcggcaataaagcgcacgacctgatacggcagtggacggcgcaggtacttttgggtcatggcaatgagagtctcgcgtgggaaggcgggcatatccatcgcgccaccacccagaatcaccgcatcgggatcgaacagattaatgctggtggcaatggctcgtgccgcgttttcaagcagactctggacgaaaggggcgttttccgcatggacgaaaagatcgctcaatgggtaatttcggggctgttgttcgtaccagcgtcttagcgccattccagagcaattggtttccaggcacccaggattaccacacgcgcagtgttgggtcatatctcccagggggatatggcccagttcgcctgccacaccgtgtgcacccgtccacggcgcaccgttcatccacactgcgaaccccatccccgtaccgagataggctgccagaaccagttgttgcgtaaggcggttttctactacgtcccaggagagttgcaggttaacgtcgcgggaaaactcaaccggacaattcagcgtattttcgagcttatcggcgagatcatataaatctgccgctgttaacggcaggttaggcgtagaaataatggtgcgtttatctttactgaccagcgccggaaatcccatcaccagaccatgacagcgagcgttaaagcgcctgagttgctcgtcaatcatttcgccgatacccgacaccaggtcgggagcaataacttctgcggtccgctttttttcgcagtgtagcgtttcaccttctgctgtccgcagacaaaagcggatatgcgttgcccccatatccacgcccgctacgacgttatgctgtttttgcatgaggctgtacctcgctttttgcagccagaatctgcgcggtcataattctccatgcttcgtcgatattttccgcatgattaaacaggccggaagtgccgacgataaagacatccgcccctgccgccattagtttttcgtaagttgcctggttgcaggaaccgtccacctcaatttcgtactccagaccttctcgttcacgccatgccttcagttcggcaactttatccagcatttcaggaatgaagggttgtccggcaaaaccgggatcgacagtcatgaccgtaattttatcagccttatggatatagtatttcatggcctcaaccggcgtttccggattaagaatcagccccactttcatgccatgacggcggatttcatcaatcaggcggaatgcctgaccgttgatagtttccggatgcaaagtgatgaaatcagctcccgcacgtgccagttgagcaatgtaatcctgcggacgcgttaccatcagatggcagtcgagcggtttactcgccagtttttttacctggcttacgaagaacggtgagagcgtcagattcggcacaaagtggccgtccatgatatcgatgtgaaagtaatcggcatggctgtcgataaattcgatctgttctttaaatttcagcagatccatacacattaacgagggggagattttcatgttcaattccttacttactgataagacggtcaagggcgacagccgcgataattaatccgcccatcaccaccagttggtaataggtttgtacctgcaaaatattcagaccgttgttgatggtgccgatgatcaacccgccaatcaccacagagaaaatgcgccccttgccgccgaagaaactggtgccgccaatgatggcgctggcaatggcataggtttcaaaacccataccggcaagcggttctgcggcaccgagtcgtgcagttgagacgacgcctgccagacctgcacaaacaccggagatgataaacaccaccaggatgtggaatttcacgtcaatcccggaatagaacgccgagtttttgttgccgcccagtgcgtagatgttgcgtccgagccgcatacgcgttgtcagaaaccaaaggatgagcgcgacaattagcgagaagataacggggacaggtatcccaattacgctggcggcaaagaagttcacgaagtcaaatgagaagccgtataccgagttggcatcggagatcaccagcgtgatcccacggaaaatagcgttggtgccaagggtgataatgaacgggtgtagtcccgtccagttgaccaggcagccgttgatcgcccccagtgcgccgccaaccagtacaccgccaattagcgccgcgagaaacggatcaatacctgccaacatcagtttagcggtcaccataccggaaagcgccagaatcgcgccaaccgaaaggtcgataccggcgaccaggatagcgaagaattcccccatgccgatcagtaccgtcacggagctttgcacaaaaatctgggtaatattattggtggtcagaaaatattctgacgacagcaaaccaaaaatggcgacgatgatcgccaggataaaaaaagtaccgtatttatcccagaacagcgcaaagttgaacggtttcttctcgctcgcttcgctttttactcgtgtggtaaagcccatgccataatctcctcttcgctcatgtcatcgcgattggtcaggatttgcgtcagtcgtccttcgcagaacacggcgatgcggtcgcagacggtgataatttcaggtagttcagatgacaccatcaggatgacttttccgtcgtccgccagttggcgcatcactttgtaaatttcggctttcgcgccaacgtcgatgccacgggtaggttcatcgaaaatgatcacttccgggtgacagcacagccatttggagatcaggactttctgctggttaccgccggagagttcagtgatgttctggtttaccgaatgacatttcagcgccagcagttcgcgctgggcttcagcggtacgttgctcgtcaacttcatgaaacaaccccatcgcgcctttatagccgccgtctttcagactgcggctgatagctatgttctgagcgatagaaaagttggggaaaaagccgttatcccggcggctttcagtgatgtaagccatcccttttttcacggcatccaggggagaacgtggagagatatctttgccattaagacggatttctccgccagcgcgtttatcaacgccaaacaggcagttcatcagttcagtacgtccggaaccgaccagtccggcaaagcctaatatttctccccggcagacgctaaatgagatatcccggaccttttttctgtcacggctggtgacgttgcgcacctcaaaaaccgtatcgtgcgcaaggttgctgacattctccttcatcgcgttaaaacggttttgcaattcgcggcctaccatcagacggacgatatcgtcatttgacacatcgctcaccatgccgctgcaaacgctgctgccgtctttcatcaccgtatagcggtcgcaaatacggcgaatttccgccaatttatgcgagatatagacgatggccgtaccctccttacgcaactgattcatgatcagaaacagatagtccacctctttattggtgagtgaggaggtgggttcatccatgatgatgactttggcgtcgagcatcagcgttttggcaatttccagcatctgcttgtggctgatagataaattcgccactttctcatctaaatcaactttcaagcccacgcgtaataacatcatggcggcgcggacacgcatttctcgccagtcgataatattgacgccacagatttttttcgtcagatgacgaccaatatataaattttccagtacggttaattcatcaataacgctgagttcctgataaataatcccgataccgagttgtgccgctaatttatgatccagtttgttatagttaatgttattaatggtaatggtgcctttggtcggctcatgtatcccggataacactttcattagcgtagatttacccgcaccattttctcctagtaatgcatgtatttcaccaggataaaccgttaaattaaccgactttaatgcgtgaaccggaccaaaggacttgccgatccccgccatcgatatatatggcgtggccataaataacctctctgcacgaaatatcgtattattgcctgatggctacgtttatcaggtctacgttcaggttattttgttggccggataagacacttcattagcatcatcatccggcatcattcagttttattgagtgaccaggattgaatcgaccagtttaaattccggtgctttatccagcgggataaccttgccggatttctcagcgtcaaccatcagcttcagacccgttgcaccgatatccgccgggttctgggcaaccgtcgcggtcatttgtccggcttccaccattttgcgggcttccggaatgccatctgtaccgacgaccaacactttgcccgtttttccagcgtttgcgactgcctgagcaacacccattgccatcgtgtcattcgcgcaatagatcgctttaatattcggattacgttgcaacacgttagtggcgacatccagtgctttaatacggtcccagtcggcaggctggctggcgacaagcttgatctggcttgcttttttgaaggcttcggtggcaccattacgacgcgcttcaccggaggcgttaccggctttaccctcaatgattgcgacttcacccccttcggcacccagcttgtcaataatgaatgacgcgcctttcgccccgacggcaacattatcggtggtgacaaaaccttccacattaccgcctgcttttttcagattatccatgtcgattttttcatcgagattgaccagataaatgccttttttccatgcgcgggcaacaggcatgaccaggttcactgaggataatggtgcgaaggcgatacctttgtaatttttattactgagatcttcaaataactgcaattgagattgaaaatcgccttctgaaggagaggcaaaaatatcaacgctgacgcccagcgtttttgcttcatcttcaatgccttttttcatatctacccaaaatggattggagagtgttttcaatacgacggcatattcggcggcagcaaaagcgctggttgacaacattaagcccacgagtgtgccgctgaaatatttcagatatttattcataatcatgttctcacggtaaggggagaggtaactccgcgatggcggaattacctttttcttatttcagcgcgcctggtgagaagaaatcaacaattgcgccggttttttgcatattaatattagcttgttcaatgttgagctgggcgacagagacaaaaaacgcgtccagcaaagtcagttgtaatattcttgccgaggcattacgacctaataacggtgtttccggggccggtgagcaaataatataatcggccagcttcgctattggtgaatgatagctatgcgttatacaaataatctttgccccgttcttttttgccagttctacagccgcttttacatcactggttcgcccggaatgggtcaccaccagcaccacatctccttcctgtaacaacgaagcagacatcatcatgatgtgagcgtccggataggcctggcagcgtacgccaatgcgcaaaaacttgtgctgtacatcagcacagatagcatttgatcctccggcaccgtacaaatcccgctgtctggcctgatagaaaaagcgggcggcacggtggatctcatcaacgttgacgatcgactgaccttccataatggtgcgtaaagtgatgttaaataccttattcaccacatcctgcggcgcttcatcaaaagccaactcggaaggcaatacttgttctgactgagaaaaataatcttccagcgcactgcgtaagttacgaaagccgctaaaccccagcagctttgataccttaacgatcatcgcttcagataccgccagagcttctgcgacatctttaattgcgggtgcacaactcaggttaccgggtttgagtaaccactccacgatgcggctttcgttttctgtcattccttcctgcttcattcgcaggtaaggcgctaacccgataccgttcggaagcgctgaatcaaactctgactggctcatcacgttctcttgtccttgaattgaagacgccactatatcaccacagcaagaacagaaaagatgctggcaacttcacaaaaaaataaaatttataaagtttattttgttgtgaataatggagagtggcttaaaatttcgtttcatttaatcactttaaaaacatgatgttatttgtctttctggtttattagatgatagatgttgctggatagtgagtgtctttaacgctattgcgctgccagatgtaactctgtaaaacagatcgggaaggcggatttcatcgattttggatgtttttaattcatttacatcacaaatgttttttgattgtgaagttttgcacgggcggggaagatgaatgaaaaagattgcatttggctgtgatcatgtcggtttcattttaaaacatgaaatagtggcacatttagttgagcgtggcgttgaagtgattgataaaggaacctggtcgtcagagcgtactgattatccgcattacgccagtcaagtcgcactggccgttgctggcggagaggctgatggcgggattttgatttgtggcactggcgtcggtatttcgatagcggcgaacaagtttgccggaattcgcgcggtcgtttgtagcgaaccttattccgcgcaactttcgcggcagcataacgataccaacgtgctggcttttggttcacgagtggttggcctcgaactggcaaaaatgattgtcgatgcgtggctgggcgcacagtacgaaggcggtcgtcatcaacaacgcgtggaggcgattacggcaatagagcagcaaaggaattgagattcatccactacttgcatggatgagtaatgactaatgtggatagagtttctttttgaggttggctaatgaaacgctttccgctatttcttttattcaccctgctcacgctgtccaccgttccggcccaggccgatattatcgacgacaccattggcaatattcagcaggcgattaacgacgcttataaccctgaccgtgggcgagactatgaagattcgcgcgacgacggctggcagcgtgaagtgagcgacgatcggcgcagacaatatgatgaccgccgccgccagtttgaagatcgccgcaggcagctggacgatcgccagcgccagcttgatcaggagcgtcggcaactggaagatgaagagcggagaatggaagatgagtatgggcgttgatataggggccggcgcgggtattttccctcacgccacctcaatctccatcccatcaaaccccgcctcaaaccccgatggtagcgcgttttccatcagccacgcatcaaactgatggctgatatgggtcagaatcacccgtggcgagcggataacctgattcagcgcaagcacggtatttaaatcacagtgattacgcggtgcatcctcgcgcggtgggtggctgcaatcaatcaccattacctgtggctgattattgcgtaaaaatttcagcgttttttccggcaggcctgcagtgtcagacagccacgccacccggctatgtgccgtttccagtagatagccgaaagtgagtttcgaatggttaagcggcagcggcgtgacctgcaacccctgcaaatcaaacaccacaaacggctccaccgtgtggctgaaatcaagcaggcccggatgtttaaacagatcgtcgcagccctgctcatccggtggaccgtagaccgggattgtgtcgcccacgccccagcgcagcgggaacagcccctggacgtgatccatatggtagtgcgtcagcaaaaactgctggaacgatccgggcgaccagcgatcggcgagatcgtgcagcccggcgtcgatcagggtgatcgcgtcgttaaacttcacgacgccgctgcatggctggcggcgatactgcggcgagcgtcgcgctctggcgcaggccgcgcactcgcagccccatgccggaacgccctgtgcgccgccggtgccggtgagcgtgagggtcaggctcatgttacagcgccttggtgaagcggaagtggctctgctcgtagccttcgcgcaggtaaaatcggtgcgcgtcgtggcgcttcacgttggtggaaagctcggtcatttcggccccggcctggcgggcttcttcttctgcccatgccagtaatttactgccgacgttcagaccgcgcgcctgcggcatcaccaccagttcctgaatttcgccgatccagttgacatgatgcagatgaaactgcaaatgcaggccgatcatgccgacaacttcgccatccagcagcgccagatggtagcgcatgttcggatcgcgcagattggcgttaaaccccacgcgaaacgcctggtggtcaaactccgcctgttttagctcacaaatcagcgcgtaaactgcgtcggtgtcgtactgcgtagccgggcgaagctcacaagcaggcatggtgtttctccttctgatgaatcagcgtcagcaacttgtcgaccgactggcgcaggctgccgtcattattgagcgtaagacaatcctgaggagtatagcgggcagcgcgcgccagccgggcgttaatttcactggcattttcacgaccacggttttccaggcgctggcgcaggatctctggcgaaacctgtaaacaaacgggcagcagcgccgattgatagcgcgcccgcgcctgcggcagatgggcgcgtgagccgttgaccaccacgtcaaatccagcgtgcagccagaggtcaatctcgacgccgacgccataatacagaccgttagcgtgccagcttaaggccagaaggttctgccccgcgcgggtaaaaaactcctgctcgctcagggcgatatggttttcacttccggcgctggcggcgcgcgtgatgtagcgatgcgctaccagtagctgagtttgttcccgctggcggagttccgtcaacagactgtcttttccggagccagaggcccccattaaccaaatcagttttcccgtcatcagaacacccttttaccctgacgccagacgtggtcgatatgaatgtggttgcccttgcgatgcgccagcaccaggtcggcgcgtttgccctcgccaatcaccccgcgatcctgaagattaagcgcctgcgccggatttttagtcaccagcttcaccgcctgcggcagcgtaaagcggttgctctcgtcatcggcgacgcgaaatgccgcatcgagcaggctggcggggtagtagtcggaagagaggatatccagcaggccaagctgcgccagttcactggccgccacgttgccggagtgcgaaccgccgcgcacgatattcggcgcgcccatcagcacgttcatgccatgcttgcgcgaggcttctgccgcttcgaacgtggtgggaaattcggcgatcacgctgccaagctgatgggattgggctacgtgggcgtgcgtggcgtcatcgtggctggcgagcgcaatgtgtcgcgcgcggcacattgcggcgatggattcgcgattcggctgtgaccagcgtgcggcgagcgccagttgctcctcttcgtactgttgcatctgcgcatcggtgagcgagtatttgccctgataatattcacgatatttttcgcggttggcgaactggcgctggcccggtgagtgatccatcagcgacaccagcgttaccggttcgcgctgtaccagtttttcaaacagcggcagcgtggtgtgatgcggcagttcgcagcgcagatgcagacggtgctcggcacggttgacgccgcgtttctgcgtctcttcgatggcgttgatcatcttctccagattctccagccgatcgccgccgtcgcgtacatcaccaatcgccacggcgtccagcacggtggtgatgccgctcgccaccatcagcgcgtcgtggctgctcatcgccgagtgggcaggccagtcaactttcgggcgcggggtgaagaatttatccagattatcggtatgcagctcaatcagccccggtagcagccagccgccttcgccgtccattgcttctgacaggtgactctggctttcggcaaaggcgcggatttcgccgtcctgcatctccagagaaccgtgtaccacctcgttttccagcaccagtttgatgttattgataatcatgaagagactcccattgggtgcaggcggtcggcgacttgctcgcgtacggtttcgtcatggaagataccgacgatggccgcgccgcgggctttggcttcgcggatcagttccactacggcggcgctgtttttagcgtccagcgaggcggtgggttcatccagcagcagaatcggatagtcgacgataaaaccgcgcgcgatgttgacacgctgctgttcgccaccggagaaggtcgatggcgcaaggtgccacaggcgttcaggcacgttcaggcgggtgaggagacgcgcggctttagcggcgcaggcttcacgcggtacgccggtatcgagcagcggctgcatcaccacttccagtgccgaaatacgtgggatgacgcgcagaaactggcttacccagccgacagtggttttgcggatctccaccactttgcgcgctggcgcggtgaccaggtcgacccattcatcaccgtgtttgatctggatttgcccttcgtcgggtagatagttggcatacagcgagcgtagcagagttgattttccactgccggaatggccgtggagtaccacgcattcgccggcgttgacggtgagtgaggcgccttgtaatacaggcaggcgcacgccgttttgctggtgcaggatgaaggttttactgacgttttgtacgttaatcatttttcgcctcgtggttcgggtgtcggatgcgacgctgatgcgtcttatccgacctacggggagcgcatttgtaggccggataaggcgtttacgccgcatccggcaccagctcaattctgcaaaaccgatgacaccagcaactgggtatacggatggtgcgggtcgtcgagcacccggtcggttaacccactctccaccactttcccttgcttcattaccagcaaacggtccgccagcagacgggcgacgcctaaatcgtgggtgacaatcaccaccgccaggttaagctccatcaccagaccgcggagcaggtccagcaggcgcgcctgtaccgacacatccagcccgccagtgggttcatccataaacaccagcttcggatgcgtcaccaggttgcgggcaatctgcaaacgttgctgcatgccgccggaaaaggtggtcggcaggtcgtcgatccggttggcgggaatctccacctcttccagccatttctgcgcggtggcgcgaatatcgccgtaatgacgcgctccggttgccatcaaccgttcgccgatattgccgcctgccgacacctggcggcgcaggccgtcaagcggatgctgatgcaccacaccccattcggtgcgcagcaggcgacggcggtcggcctcgctcatcgcgtacagcgaacggttctcgtagcgaatttccccttgctgtggtgtcaggcgggcggaaattgatttcagtagcgtggtcttcccggaaccggactccccaacaatgcccagaacttctcccggccataaatcaaaagagacatcgctgaagcctttgcccggggcataaaggtgggtcaggttattgaccgaaagtaacggttgattcattggcttttggcctcgttctgttggcggcaataatcggtatcggagcagacaaacatgcggtttccggcgtcatccagcaccacttcgtcgaggtaactgtgggtcgatccgcagatggcgcatggttcatcccactgctggacggtgaacggatgatcatcgaaatcgaggctttccacgtgggtaaacggtggcacggcatagatgcgcttctcgcgccccgcgccaaacagttgcagggcgggcatcatgtccattttcgggttatcgaatttcgggatcggcgacgggtccattacgtagcgcccgttcaccttcaccggataggcgtaggtggtggcgatatgaccgaagcgggcgatatcttcatacagtttcacctgcatcacgccgtactcctccagcgcgtgcatggtgcgcgtttccgtctctcgcggctcaataaagcgcagcggttcggggatcggcacctggaagataatgatctgatcttcggtcagcggcgtttcgggtatgcggtgacgcgtctggataagtgtcgcatcgtccgtgcgctcggtggtgttcaccccggtcacgcgcttaaagaagttacgaatcgacacggcgttggtggtgtcgtctgcgccctggtcaatcaccttcaacacgtcgctttcgccaatcacgctggcggtgagctgaatgccgccggttccccagccgtagggcatcggcatctcgcgtccgccaaacggcacctgataaccggggattgccaccgcttttaagatggcgcggcggatcatgcgtttggtctgctcgtcgaggtaggcaaagttgtagccgctcagattagccatggttctgctcctgttgcagacgtttgagtagctccagttcggcctggaaatcgacgtagtgcgggagtttgaggtgcgagacaaagcctgcggcttcgacgttgtcggcatgggccagcacgaactcttcatcctgtgccggacctgttgcgtgctcgccgtattccggtgcctgcaacgcacggtcaaccagcgccatcgccattgctttgcgctcgctcatgccgaacaccagcccatagccgcgtgtaaaatgcggtggttcatccggcgggtcgataaaaccgttgaccatttcacattcggtcatcagcagttcgccgacgttcaccgcaaatcccagctcttccggcacaatcgacacgtcgatatagccgctgcggatttcgcctgcgaacggatgattgcgtccgtaaccacgctgggtggagtaggccagcgccagcaaatagccttcgtcgccgcgcattaattgttgcaggcgggaggagcgtgagcaggggtaaaccggcggcgtgcgggtgatgtcgtccggctgtgcgccgctatcttcttcaaacttcgccagcccctgacgcgccagcaggctgaaaacgtgcggcgacggctgttgttcgctgtcggctgtggtcagcgtcggcgtttcgccgtttgccagcagggtgaaatcgagcaggcgatgggtgtagtcgtaggtggggccaagcagttggccgccgggaatgtctttataaattgctgaaatacgccgttcgagacgcatcccggtggtgtcgagcggctcactgaccgccagcttcgccagcgtggtgcggtaggcgcgcaacaggaaaatcgcttcgacgttatcgccgctggcctgtttcagcgccagcgcggccagctcgcggtcggcaataccgccttcggtcatcacgcgatctaccgcgaggttaagctgctgttcaatctgggcgacgctcagttcaggcaaatcagtatcgccccggcgtcggctctcttgcagggcgtgggcggcgtcgatcgccttttcgccccctttcacggcaacgtacatcagcacacctccacatgagtggttcgcggaatagccagcaggcgctcgccgcaggtcaggatcaggtcgatgccgagcgggaacgggtgcgggcgctcggtaagttcatgaagaatgcactttggcagttgcggggcgatcatccgttcttcggcaatacctgcgccggtgaggcgcaacatacgcccaccgctcaggctggtgacctgtaaaatcagcgttgcgcccgcttctggtgcaacggcagtgccggtggaaagggcgttgagctgctcgctggagatcgcctcatctgttaccgcgaaggtcgcctgtttcggctgattaaccagcggcgcgttggtatgaaaacgcaggctctgattgacgatatcgttgctcaatggtgcggcaagccacaccggcgtgtcgttatcggccagcgtcagcagcacgctggtggtggcgatattcagcggctgccagccgcgcttgagctgatgcagggcgacaatcacgcccggctcgctcatggcctttaacaggcgacgaaaactgtgctgggcatcctgcacgggaagcataaaagcggtttccagggtcatgcgttgtctccgcgaaccatcgtaaagaagtcgacccggctggcgttcacttcggcctgacgcgcggcaatgcgtgccatacggtcagcgtccagcggggtaataagggtttctgataagttttgaaagtggcggttttgctgcatcagcgcatcaatcagcgcacaacgttcggcgtgctgtttgtcgcgccccagcacccagctatagccgagcgtgccgtcagtcagacgcacggcggcgcgggtgagcgtggcgtcgccagcaaaaaagcgttcgccggtgccgcccattcgcgcctgaatctgcaccaggccagtttcagcggcgcggatcacctcataatcggcgttgatgttcagcgcgttcaggcgggctgccagttcagccggttggctgtgcgccagcacggacatccagtgctggcgggtcgcggtatctgcgtgcattcagtgctccatagtgaattcaatcatgtcggcgcgcgtcaggctgacggagtactccgccgggctgctttcaccgtcacggtggttaagggtgcgcacgcacagcagcggcgacagattcgggatttcaagacgctggcactctttggcctgggcgcggcgggcgctgatccgcgtctggctgcgtcgtagcgtaatccccgtttgctcgcgcagaaaatcgtgcagcgaaccgctgtcgaaacgttgcagcgtcggccagagggtgaggtccgcaaagtagtggtcgattaaacagagcgcgacgccgttgacccgacgcagggtgcgcaggtggatgacgttctccccctcggttatccccagcgcgtcagcgacgtgaccggaggcggggcgcagcaccgatagcaatttttcgctggtgggatggctgccctggtccagcaggttctggctaaaacgcgcctgggcgttgagcgggtaatcgaacgggcgcatcagcaccagtacgccgacgccctgacggcgctgtacccagcctttttccaccagttggtcgatggcgcggcgcagggtgtggcggttcacctcaaagcgcgccgccagttgctgctcggcgggaagatagtcgccgcagcggtagtgttgacgaagctcctgctcaagttttgcggctatctcctgatagcgtgttgggtagctggtcggatgtgtagacaagtgcatagatatcaatgcctcgctaatcagataaagtgcttacgcaaccgttgagagaggaaatccagcaggctgaccgtgacgataatcagcaccatcagggcgcaggtttgctggaactggaaaccgcgaatcgcttcccacagcgtgacgccaattccgcccgcaccaaccataccgacgacggtcgccgagcggacgttggattcgaagcgatagagagagtaggagatcagcagcggcatgacctgcggtagtacgccgtaaaggatctcttccagcttgttggcaccggtggcgcgaatgccctccaccgggccgggttcaatcgcttctaccgcttcggaaagcagtttggaaagtacaccggtggtgtggataaacagcgccagcacgccagcgaacgggccgaggccgacggcgaccacgaacagcatggcgaagaccatttcgttaatggcacggcaggcgtccatcaggcggcgtacaggttggtagacccaccacggtaccaggttttcagcgctcatcaggccgaaggggatggagagaaccaccgccagcgcggtgccccagacggcgatttgcagcgtgacggccatttcggtgaggtaatcctgccactggctgaaatcgggcgggaagaagtcggcggcgaacgtcgccatgttgccgccatctttaatcagcgtaagcggggccatttccgcgccctgccacgagacgaccagcacggcgataacaacggcccagctcagaagcgagaaccagctgcgcttgggtggggcgatggtgatggtttgcatgtttggctccggtctgtaggccggataaggtgcttgcaccgcatccggcatcaacgtctgcacattgtcggatgcgacgccggggcgtcttatccgacctacgatttactgcaccgctttactcaccgaactcattgcgcttaacgcgttgttcaggcggtccaaatcatccagttgcgcctgaatggcggtggtttttgccagcttgtcctgttcgttcagccctttgttgtccttcacgctttgcatctctttaaacagtgcgagctggcgaatcggcaccagttgcaagtcgctggaggcgcggaacggcgcccagcccaggcgcttcagcaccgctttctcttccggcgttttgccgtaattcataaagaagtcgtagatcttgtctttagtggtttcggaaagatttttgcgccagacgatcggatcgccagggatcagcggtgatttccagatcaccttcagttctttcagcttctccggcgcggaggttttcagcttgtcgaggttttcggtgttgttggtggcgacatccacttgcttgttagcgacggcgagggcgttggtttcatgcccggcgttgacggtgcgcttaaagtcgctggcggagatattgtttttagcgaagacgtagtaaccggggacgaggaagccggaggtagagttaggatcgccattgccgaaggtgagatctttccgcttcgccagcagatcgttcaggttgttgatcgggctatctttgttgacgatcaacacgctccagtaacccggcgatccatccgccgcgaccgtctgggcgaagacctgaccgttggcgcgatccaccgcttccatcgccgacaggttgccgtaccaggcgatatccactttattgaagcgcatcccctggataatgcccgcgtagtccggggcaaagaaggcgttgacctttacgcccagcttcttctccatatcctgtaagaacggcgtccattgcggtttcaggttttgctgtgattccgttgaaataatgccgaaattcagcgccttttcctgctcttcggcgtatgccggatttaacagggtgctgaggctgaacatgctggtgaaggccagcgaggcaattatcttagcgttcattcgttttcctcaatgatggggatgtcaggcagctttcgcgttctcttcgacgcggttaatgctgcggtagagatggtcaaaacgttcgttatcaaacagttggctgcagccgtcgtagaagacgtgcccctggcgcagggcgacgatgcgttcgcagtagcgcagggcgtaatccacctgatgcagcgtgacgaccacggtaatgccgtcgttctggttgatgtcgcgcagggtgtccatcacgatgcgtgccgattccgggtccagcgaggcgatgggttcgtcagcgagaatgaccttcgcctgctgcatcagcgcgcgggcaatcgccacacgctgttgctggccgccggagagtgtggaaacacgttgatgggcaaagtgcaccatgccaacgcgggtcagcgcctgtaacgcgcgctgtttctgctcgcgggtgaagtagctaaaacaggttcgccagaatggcgtgctgccgagcgcgccaatcagcacgttctccagtacgctcaggcgattcaccaggttgaactgttgaaagatgtagccggtatgggcgcggcttttgcggatatcgcgggccagacggccttcgcgctggacagtgcggcccagcagctcgatatggctaccgacagatttatcgccggtaatcaaaccgcttaagtgacgtaaaagagtggattttccggaacccgacggcccaagcagagccaccatttcaccatgatgaatgttcagatcaaccgcgtgcagcgcctgatgctgattgaaggttttggcgagcttctcgacacggataatcgtttgcatgatgcagcctccctaaaaaagtggctccatcgtggcggattattgtgacgatttggttaattaaaagtgactaacagatgaagagttaacgggaattcgatgacagtgcgggagggcgggcctcccggcgggttattgcgttggctgttgtttgatgacattaatcatccacggtacgccaaatttatcggtgactttgccaaagccatgcgcccagaacgtttcctgccaggccatttcgatttttccgttggcggcaaggttatcaaaccagcgttttccttcttccacctgttgagaatcgagcaccagcgtaaagccggagtagctggcttttcctgacggtatagcatcgctcatcatgatgtcgcttccggcaatgcgcacgttggcatgcgcgatggcggtatcgggaaattgcattccggaagggcagttttcggcgctgtcctgcgctgatttcggcatttcgccgaagctgattttatagagcagttccgcgcccaacgtacgttgataataggcaatcgcgtcggaacagttaccggcaaaagagaggtagggacttaacggcatgatggtgacctcagttaagagaagcccgttaagtgtagttcgaaatttatacagatgagagggaagcctgataagacgcggtcagcgtcgcatcaggcagtcggcatcgttgccggatgcggcgcgagcgccttatccggcttaccgatcacaatacaatcagttctttttcacaaactcagatttcagtttcatcggaccaaaaccgtcgattttgcaatcgatgttatggtcgccttcaaccaggcggatgtttttcactttggtgccaattttcagcatcgaagagctacctttcaccttcagatctttaatgatggtcacgctgtcgccgtcagccagcagattgccgttagcatctttaacgatcagctcgtcgctttcctgtgcaggttctgcgtcgttccattcgtaggcacattccgggcagatgtacatgccgttatcttcgtaggtgtattcggagttgcattttgggcagtgtggtaatgacatgtggatttcctcaaaagtcagcagggcaaaagcgccaaaaaacggcagattgccgaaaaaggccgcaattatacacaaaatccctgagtttgtcgggggtactgctgattttagacgacgatcgttttcatttgaaaggaaacgcaaaaagaaaataatctttttgcctccatttattatttaagataaggttaatgttctacttgttctttttttaattcaaatgatattttttatctttctgacgttttaaacgtatcggaagacgttatttattctaataaaaaataacactctaaatataaaattatttcttgcagtaattataaaagccgaaaacagaactcaaaagcaatctggctaaataaaagtaataaaatttgctttaaggaagaattttctatgtacacacagaccctgtatgagttaagtcaggaggctgaacgcctgttacagctttctcgccaacagttgcagttactggaaaaaatgcctctctctgtacccggagacgatgcgccacaactggctttaccctggagtcagcctaatatcgccgaacgtcacgcgatgctgaataatgagttgcgtaaaatttcccagctggaaatggtgctggcgattgtcggtaccatgaaagcagggaaatcaaccaccattaatgccattgttggtacggaggttctgcctaatcgcaatcgcccaatgactgcgctgccaacgcttattcgccatacgcccgggcaaaaagaaccggtactgcatttttcacatgtcgcgccaatcgaccatttaattcaacaattacaacagcgcctgcgtgattgcgatattaagcatctgaccgatgtgctggaaatagataaagatatgcgtgcgcttatgcagcggatcgaaaatggcatcgctttcgaaaaatattatctgggtgctcaacctatttttcattgtctgaaaagtttgaatgatttggtgcgactggcgaaggcgctggacgtcgattttcctttttctgcttacgccgccattgagcatattcccgtgattgaagtggagtttgtccatctggcggggctggagagttatcccggtcagttgacgttactggatacccccgggccaaatgaagccgggcaaccgcatctgcaaaaaatgcttaaccagcagctggcacgcgcctcggcggtactggcggtgctggattatacgcaactgaaatcgatctccgatgaagaggtccgtgaggcaattttggcggtggggcaatcggtgccgttgtatgtgctggtcaataagttcgatcaacaggatcgtaacagtgacgacgctgaccaggtgcgggcactgatttccgggacgctgatgaaaggctgtattacgccacagcagatatttccggtgtcgtcgatgtggggctacctggcgaatcgggcgcgccatgagttagccaacaacggtaagttacccgcgccagagcaacaacgctgggtggaagattttgcccatgccgcgctcggcaggcgctggcgtcatgccgatctggcggacctcgaacatattcgccatgctgccgatcagttgtgggaagattcgctgttcgcccagccaattcaggcgttgctttatgccgcttacgctaacgcctcgttgtatgctctgcgatctgccgcgcataaactgttgaattacgcgcagcaggcgcgggaatacctggattttcgtgcgcacgggttaaacgtcgcttgtgaacaattgcagcaaaatatccatcaggtcgaagaaagtttgcagctattgcaactcaatcaggcgcaggtgagcggcgagattaaacatgaaatcgagttggccctgacctccaccaaccactttctgcgtcaacagcaagatgcggtgaatgcgcagttagccgcgttgtttcaggatgactcggagtcgttaagtgagatgcgtacctgctgtgagacactgttacagacggcgcagaacaccatcagtcgcgactttacgctgcgctttgccgagcttgagtccaccctttgccgggtgttaaccgatgttattcgccccattgagcaacaagtcaaaatggaattgagtgagtctgggtttcgtcctgggtttcattttcctgtttttcacggcgtagttccccacttcaacacccgccagctgttcagtgaagtcatttcgcgccaggcagcaacggacgagcagagcacgcgtttaggcgttgtgcgtgagattttttcgcgctggttgaatcagcccgactggggacggggaaatgagaaattcccgacagagacggttgattacagtgtgttgcagcgagcattaagcgcagaagtcgatctttattgccaacaaatggctaaagttctggcagagcaggtcgatgaatctgttacggcaggcatgaatacttttttcgctgagttcgcttcatgtttgacggaattacagacgcgtttacgcgaaagtatggctctgcgtcaacaaaatgaatcggtggtcaggctgatgcaacagcaattgcagcagactgtgatgactcacggctggatttacaccgacgctcagctgttacgcgatgatattcaaacacttttcacggcagaacgatattgaccaagacgttactggacggccccggtcgcgtgctggagtcggttcatccgcgctttttagtggatctggcgcagggcgatgatgcccgccttccacaagcccatcagcagcagtttcgtgaacgactgatgcaggaacttcttgcgcgcgtgcagcttcagacatggacgaacggcggcatgttaaatgcgccgcttagtctgcgtctgacattggtggagaaactggcgtcgatgctggatcccggtcatctggcgctgacgcagatcgcgcagcatctggcgctgctgcaaaaaatggatcaccgccagcactctgctttcccggagctcccccagcaaattgtcgccttgtatgagtggttttcagcccgttgtcgctggaaggaaaaggcgttaacgcaacgaggcctattggtgcaggcgggtgaacagagcgagcaaatttttacccgctggcgtgctggggcgtataacgcctggtcgttgcctgggcgctgctttatcgttctggaggagttgcgctggggtgcatttggcgatgcctgccgtctgggaagaccgcaagcggtggcgttgttgctgggtgatttgcgcgtgaaagcgacacaacatttggcagagagtatcaatgcggccccgaccacgcgtcactattaccatcagtggtttgcctcttcgaccgtttcgacgggcggggatcatgctgattttttaagttggctgggaaagtggtccacggcagataaacaacccgtttgctggtcagtgacccaacgctggcgaactgtcgcactggggatgccacgactctgttcagcgcagcgtctggcgggggcaatggtcgaggaaatcttctctgtaaatttggtgtaaataatcagttacaccaatgagtcctaaacgaaatacatgtgtgaagttgatcacaaatttaaacactggtagggtaaaaaggtcattaactgcccaattcaggcgtcaactggtttgattgtacattccttaaccggagggtgtaagcaaacccgctacgcttgttacagagattgcatcctgcaattcccgctccccttttgcggccgtcgcgctgatttttctggcgtttgcggaaatgggccaactctgcgaggaaagctatgctgaaaaggaaaaaagtaaaaccgattacccttcgtgatgtcaccattattgatgatggtaaactgcgtaaagccattaccgcagcatcactgggtaatgcaatggaatggttcgattttggtgtttatggttttgttgcttacgcattaggtaaagtttttttcccgggggctgaccccagcgtgcagatggttgctgcactcgccactttctccgttccctttctgattcgaccgcttggcgggctcttctttggtatgttgggcgataaatatggtcgccagaagatcctcgctatcactattgtgattatgtcgatcagtacgttctgtattggcttaataccgtcctacgacacgattggtatttgggcaccgattctgctgttgatctgtaagatggcacaaggtttctcggtcggcggtgaatataccggggcgtcaatatttgttgcggaatactcccctgaccgtaaacgtggctttatgggcagctggctggactttggttctattgccgggtttgtgctgggagctggcgtagtggtgttaatttcgaccattgtcggcgaagagaacttcctcgattggggctggcgtattccgttctttatcgctctgccgttagggattatcgggctttacctgcgccatgcgctggaagagactccggcgttccagcagcatgtcgataaactggaacagggcgaccgcgaaggtttgcaggatggcccgaaagtctcgtttaaagagattgccaccaaacactggcgcagcctgttgacatgtattggtctggtaattgccaccaacgtgacttactacatgttgctgacctatatgccgagttatttgtcgcataacctgcattactccgaagaccacggggtgctgattattatcgccattatgatcggtatgctgtttgttcaaccggtgatgggcttgctgagtgaccgttttggccgtcgtccgtttgtgcttcttggtagtgttgcactgtttgtgttggcgatcccggcgtttattctgattaacagtaacgtcatcggcctgatttttgccggcttactgatgctggcggtgatccttaactgctttacgggcgttatggcttctaccttgcctgcgatgttcccgacgcatatccgttacagcgcgctggcggcggcatttaatatttcggtgctggttgccggtctgacgccaacactggcggcctggctggtcgaaagctcgcagaatctgatgatgcctgcctattacctgatggtagtggcggtggttggtttaatcaccggcgtaaccatgaaagagacggcgaatcgaccgttgaaaggtgcgacaccagcggcgtcagatatacaggaagcgaaggaaattctcgtcgagcattacgataatatcgagcagaaaatcgatgatattgaccacgagattgccgatttgcaggcgaaacgtacccgcctggtgcagcaacatccgcgaattgatgaataagctgaaacggatggcctgatgtgacgctgtcttatcaggtcaattgaactcttaaggttcacttaatctctgacgcgcatactctcctccaggttaacggaggagagtgcaatgaaaaaccgtgtttatgaaagtttaactaccgtgttcagcgtgctggtggtcagcagctttctttatatctggtttgccacgtactgatcttttttcagccgtatccaggcccgcgtgccggaagtctcttgccggttttgcaggaaaaactgcccgtgatgcaactgtgtaatgcggctgacaatacttaaccccagaccaatcccgccataacggctgtccattcgtacaaacgctttactcaactccccgcatttactctcatcaatacccggtccttcatcttcaacggccatgaccgctccgccatcttcttgcagcttaatcataatgttgctgccttgtgggctataacgatgggcgttttctaccaggtttcgcaataacatccgcagcagggttgcatcaccctgaacggtgatgtcggcggcgctctctggcaatagcagggtttgctggcgctggtcgagcatggtactgagttcgtcatacgaggggagaatgacatcttccagcagttttacatgttgataattaccggaagaaaatgactgtccggcacgcgccagttgcagcagctgggagacgctctccatcatctgatcaagtcgtgccactaacggtgctacatcaatgtgatgcgttttcgccagcagttccagatgcaaacgcacccccgccagtggcgttcgcagttcgtgcgcgacgtcagcggtaaacaacctttcattatcgagcgtgctggtcaggcgactgaccagatcgtttaacgccgaaaccaccgcatcgatttcgagggtggcgctatgaatggcaatgggcgttaagttgtcggcggtgcgcgcttccagctctttttgcagctccgccagcggtcgggtgatgcggcgtaccgcctgatagcagataaatagcgtcaggctaaccataaagacgccggggacaatcaggctggcgaccgcctcgcggatctcacgcatgatgtggcgatcgttgttgcgattgtcgcgtagcgcctgctcaaacagctgaatctgctcggtactttcatgccatagccagaagacgctgatcagctcaaacaccaacaaaatggccccgatggtcaatatcagccgttggcgcagcgatattggtcggcgcagaaaacgcatcagattcaattagttttcctcatttgcgaccagcatatagccaaatccgcgcacggtgcggatacgggctttgcccactttgtcgcgcaggttatggatatgcacttccagggtgttggtcgagggctcgttgtcccagttgtagatatcgttgtagagaatttcccgatgcaccgggctgcctgctttaagcatcaggcgcgacagcagagcatattctttgggcgtcagaatcagttcttctccgctcatccatacctggcggcgacccatattcagcgtcaggttgccaacgttcagctcactttcgccctgattattatggcgtcgtagcagggcgcggatacgggcgtgcaactcttccagcgcaaaaggcttcaccagataatcgtcggccccgacatccagcccggcgattttgtcggtaagggtatcgcgggcggtgagaattaacaccggcagagtgtattttttctgccggatacgggcaagaaaatgcagcccatcttcatcgggtaagcctaaatccagtaccaccaggctgtaatgaccggcctcaaggctttgttccgccatccgcgcggtgctcacgccatcgcacgcgtagccttcggtttgcgccgccagaatcaatccctgcaataacagcgtatcgtcttcaacaatcagaattttcattcactcactctcctgcaagtttgcagaatatcatccgcagcctggtaatacttcgtctcaacgccagtcaggcccaataaggttgagaataaattgtcttgtgaatagtgttgcgtttgcgcctgtttttgcaggcagttctggtcaacctgataccgtttttgataatcctccgatagccacagcagcatcggcacctgtttttggctatccggggcgatggcataaggcagaccgtgcagatagatgccattttcacctaacgattcaccgtggtcagaaagataaaccaggctggtggtaaatttatcctgatgttctttcagcagattaatcgctttatcaacaatatagtcgacgtaaaccagcgtgttgtcgtaagtgttcaccagttgctctttggtacaggtctggatctcgttagtgtcgcaggttggggtaaatttcctgaactgcggcggatagcggttgtaataggtcgggccgtggctgccgatagtgtgtaatacaatgaggccatcgctttgcagattattgatgtactcttccagcccgtggaacagcacttcgtcatagcattcgccgttgatgcactgaccaggcaggttcagcgcggtgatgttctggtgaggtacgcgatcgcaaacgcctttacagccgccatcgttgtcattccacagcacgttgatgcccgctcgctgaatgatatccagcacgccttcctggtgctgtgccagctcttctttgtagtgctcacgcggcatatccgagaacatgcacggcactgagacggctgttgctgtgccgcaagaggcggtattagggaaatagaccacgttatcttttgccagccgcgggttagtttcacgctggtaaccgttgagggagaagttctccgcccgcgaggtttcgccgacgatcaaaatggtcaggtttttacgtttcccattttgcattaatgggttgcggtgagcatcttcaccaatgcgtatcagtggcaggttggctgaccgctggtgagagtaccacgaccagctagcaacaatgctgttggacgggcttaaggatttcaccagctctttgttgttgcgaaacagcgaggcatagtctttgtagaacagtgcggcaaccagcagaatcagcagcacagaaatcaggatgttggccccgcggaaaagaacgctgcgcaggcgtgaggtggtgggtttgattttgatccagcaggcaataatcgcggccaacacgccacttaaccccagcgttaataacattcgtggcgtcatcaacgcataactttccgccggcgtagtatcaatgatattggtgatcattgaacggtcgatgacgatgccataggtcatgatgaaatattgtgcagccgcaccgaccagaataaacaggcaggcgagtggacgattaagccataagaaagagcctagtgtcaggacaatattaatcacgctgaatgcgacgaccggcatcgacaagaaaaccagcacgttatgcagtgaatccagcggtaacacctgtagcacctgtttaaaaaaggcgatattcaggcagactgagatataaaaagtagcaagtaataaccaggagaataaatttaaagagggtctttttagtaggcgcttcaacatcacggtgtttccatcgaacaaagtgcgcatatgctcgcaaagcaaaattaagccaaccttaagttcttaaggttggcttttatgtttgcttgattaaggggaattaatctttgcttattggtgcatctaagggatacgggtttttatgcagccggttgtaattcagcgcatacatggcggtgattaccatcagagtgacaaatgaccacataacctctttcgcgccggaccctactacggcccagatgcagtagaggaaggcaatggtagtaactgccaggtatgccgggcgtgctttaccaaagtgaccgtggccgagcagtagtaacgctgcacaggtgtaaagatatggcaccagtgtaaagatgaccgacacggaagaaaccagaccgaattctttggtcgcgtttggcgaaatgctactgagctggaagatggtcatcaaaataccgacgataatcagccccgccactggcgtgcccgctttatttacacgggcaaaaatcggtggaaacagtccgtcatcggcagcggctttcgccgtttgacccgccagcaacgtccagccgcccagtgaacctaagcaacccgcagctgcgcagaaggaaacaatggccccggcggtgtcacccaacgccatccgtgcggcatcaccgaatggcgaagcagaaacgcgcagtgcggcattagggatcatccccataatcgcggtggtagaaagtacatagcaaacggcagcaatcaataccccgccaatggtagcgatagggacgttgcgtttcgggtttttcaccacacctgcggcaacggaggcactttccacaccgatgaacgaccacagcgtaacgttaagggtactttgaatcgcaccgaaggtgcccagaccgctgacgttccatgccgccatataggtttcaccacggaaccagaaccagccaaatacggcaatcccgacgatggggatcagcgccagcacggtagcaacggcctgtacgcgggtgatcattttcggaccgacaatgttcagcaggacgaagatccacagcaccacgacgcaggtgatggttaataccaatgggtctttcagaatcgggaagaagtaacttaaatatcctacgccaatgaccaccatggcgatattgccgatccagcaggccagccagtagaggacgttggtttgataaccgagaaacgggccaaagcagcggcgggcgtaagcgtaagaaccaccaggacttgggtcgaggaacgacattttggcgtataccatcgagagccccagcgcaccgataatcgtcaccaaccatccataaatggcaatcccgccagtggaggccaggtttgcaggtaacagaaaaacacctgaccccataatattccccgacaccatcagggtgacggggattaagcccactttgtgagcatcagcatccgaagacataattaaactcctgcgaaggcgagcttcgtgacaataaattacgtcgtatcatacgcctgcattcgatagttgaattattatcggccgggttatcgctgatgccgttattaatatagctcttcgttaaggttaaaaatcaggcgacagtgcgttctctgtgctgactaacataatgcagcggcgtcataccgtagaagtctttaaagacagaaataaagtacgacgtactgttgtagccgcaggactgtgatacctgagagatatttttaccgtccatcattaattcatttacggcatagcgcatgcggcaggtggtgattatttggctataactggtgttttcgcttttcagctttttctttaacagacttgggctaagacataaacaactggctaccatactaagattccagtctttgtggatatcgctttcaataatttgataaacgctgtcacttacacaattacgtaacatatacatcattagtgaaaggaattttttactgtcgagaaaacgggatagcacagtgaataataatgcacgtgttcgttccttttctgactcagtttcagcgggcatcatgctatgctgcgcggcaacgcgaaagacgtctggcgtcaggcatggcagggtgaggatgggcgtagcgctacgttgccatactggtatttgcgagagatctttattcagaaaccggaggtaatctttgatgatgtcgtgactaatatgagcaaccaaagtgttattaagagaggagacgtcgataatattattttcacaatttaataacgccatgtggttagctttaaggctaataggttctttcccattcacccttatccagacatctttttcagtcaataaaacaatacaaggttggtcgctgcaaatcctcatacatgtactcctgagtgcgaataaaagaccagttctcgctaaagcgaagcgataccgggaaatggttatataattgtatgatgaatataaacatgcataaaaataacgagttttactaatattacaaatttttatagtaatttctcatgtacatatttttttacaggctaaaaaaaggataaataacaggcaaaaaaaagcgcggggtgggaccgcgcaaaaagcatgacattttttgtttgcagcaatttttatgaaaacgttgccatacttaaaaggcctcaagccaggcggcgtaatgttatttaacaattacgccttcagcggaatagtggttacgctttcacacacataacgtggtaaataccgtcaataatttctgtcccttctgtttcgtgttcaaatccagggaaatgatggtcccaggattgcagtgagcgtaaataacttacttgcggactgtttttatcgccgaagttttcaccagacagcagcatcgggattcctggcggatacgggataactgagtttgccgcgatacgtcctggcagattttcaatggataccagttcgacattgttgtcgacaatcgcgttgtacgcttcacgcggggtgatttccgccaccggtaggccagaataggcttcattcaaccgtgcgccagggttgttttctttcagccaggcaaacatggtgtcacccagatcgtgaatccccatgttcgcgtaagtgtcaggatattgttcaacaagttccggcatcacctgcgccagcggtgtgttggcatcatagtggcgtttgaaggagcaaagggtgttaaccagagtcccccatttcccacgggtcacgcccatagagaacaggaacataatctggaagtcagtggtacgggtaggcacaatgccgtggcgaccaagccaggctgtgaccagcgccgccggaacaccgatttcttccagttcaccatcttcacccattcccggagcaaggatgctgactttaatcgggtcgagcatactccagttatccggaatatctttgaagccgtgccagctttcgcccggatgcatgacccagcagtcctgaacggtggtcagcagtttggttggtgcgtcagcaaagtcataggttttgccggtttgtgggtcggtgacgacttctttgttccacggtttgaagaaccagctaccgtcagcggtgaactctttatacagccgcgccatcgcctgacggaaatcaaccgcttcgtcgatcacttcctgggtcagtgacaggccgctgttgccgtccatcatcgacactgccacgtcgttggatgcgcagatggcatacagcggggaggtggtggcatgcatcatgtaggcctggttgaagcgggagaagttaatcgccccacgaccttcacgtacatgaatataagaggcctgggacagcgcattcagcagtttgtgggtggagtgggtggcgaaaacggtaggaccgttgtgatcgccaggttcgccgcgcatggcatagtgatcggcatagatcgggttgaaacgtgcatagccgtaccaggcttcgtcaaagtgcagacgatcggaggttttttccagcagatcctgcgcttctttagcgttataacacacgccgtcataggtacagttggtcaccacgcagtaagacggtttttgcccgactttgtctttggtcagcgggctttcactgattttcttctgcaaggtttcaggttgcatttcctgcggatagattggcccgataatgccgtagcggttgcggcttggcaccatgtagaccggtttcgcgcctgtcagcatcaagccttgttcgatggatttatggcagttacggtcaacgaccacgacatcgttatcggtcatgcaagcctgcatgatggtgcggttagagccggaagtaccgacgactaccgaccaggagcgatcggcaccaaatacgcgtgcggcatatttttcgctttcgccaaatgcgccagtatggtcaagcaaagaaccgagggaagtgcgttcgatgcccatgtcggtgcggaacagattttcaccatagtagtcatggtagaaacgtccggcgggtgttttagtaaaaccaacgccgccctggtggcctggcgctgcccaggaatattcatggatgtcgctatatttcatcagcgcgctgaacagtggcggcaacagctgctggcggtagcgggtcatcgcggcaacggcgcgtccggcgataaagtcggcagtatcttccagaatccaggcgaattcatcgacaagctccagcagatcccggtccattgcggcgagggctttttcccgatcgcccaacaggaagaccggcacgttttgttggcgctcatgaagcttaccgatcaattgtctgacgttttgatgttcgtccggatgttccatttgatagctgaacatcaggcagtcaatggcttcgtttgaagagagaatggcaaaaccatcatcaaaggaggtggatttaatcacggtaacattttgctggcttaaagcatctgccagacgctcaacggcgttaccgacccaggtgtcttgatggagaaactcgctttcaacaattaatactttcatcattgcttacccggttatgaaggaatcttcgttgcgggcaagtatcttccggccttttcgggctgtaaagcgcgtgaaaaacaaacatttttgaaatatttatttttataaacaatacgttatgtgattattttaaattattctcactgcttattatcgacggctaaactatttttttggctgatactgatatcgtctttagccgggaaacgtctggcggcgctgttggctaagtttgcggtattgttgcggcgacatgccgacatatttgccgaacgtgctgtaaaaacggctactcgaacgaaagcctgccgtcagggcaatatcgagaatacttttatcggtatcgctcagtaacgcgcgaacgtggttgatgcgcatcgcggttatgtactgtttcatcgtcaattgcatgacccgctggaatatccccattgcatagttggcgttaagtttgacgtgctcagccacatcgttgatggtcagcgcctgatcatagttttcggcaataaagcccagcatctggctgacataaaattgcgcatggcgcgagacgctgtttttgtgtgtgcgcgaggttttattgaccagaatcggttcccagccagagaggctaaatcgcttgagcatcaggccaatttcatcaatggcgagctggcgaatttgctcgttcggactgtttaattcctgctgccagcggcgcacttcaaacgggctaagttgctgtgtcgccagtgatttgatcaccatgccgtgagtgacgtggttaatcaggtctttatccagcggccaggagagaaacagatgcatcggcagattaaaaatcgccatgctctgacaggttccggtatctgttagttggtgcggtgtacaggcccagaacagcgtgatatgaccctgattgatattcactttttcattgttgatcaggtattccacatcgccatcgaaaggcacattcacttcgacctgaccatgccagtggctggtgggcatgatatgcggtgcgcgaaactcaatttccatccgctggtattctgaatacagcgacagtgggctacgggtctgcttttcgtcgctgctgcacataaacgtatctgtattcatggatgactctctttcctggaatatcagaattatggcaggagtgagggaggatgactgcgaacaggcgcacggttttatttctctccctggaggtgcgaggagagcggatgagaagactggggtcgattattcagcttttcaggtaatttattcccataaactcagatctattgatgtgccacttaggatctgagtttttgggaatgctcaaccgggaaaccggaggttttctgcgatatcgcctgccatgatgaagtcattcaagcaagccaggagatctgcatgatgtctgcacctaaaattacatttatcggcgctggttcgacgattttcgttaaaaatattcttggtgatgtgttccatcgtgaggcgctgaaaacggcgcatattgccctgatggatatcgatcccacccgcctggaagagtcgcacattgtggtgcgtaagctgatggattcagcaggggccagcggcaaaatcacctgccacacccaacagaaagaagccttacaggatgctgattttgtggtggtggcatttcagattggcggttatgaaccttgcacggtgactgatttcgaggtctgtaagcggcatggtctggaacaaaccattgccgatacgctggggccgggcggtattatgcgcgcgctacgtaccattccgcacctgtggcaaatttgcgaggacatgacggaagtctgccccgatgccaccatgctcaactacgttaatccaatggcgatgaatacctgggcgatgtatgcccgctatccgcatatcaagcaggtagggctgtgccattcggtgcagggaacggcggaagagctggcgcgtgacctcaatatcgacccggctacgctgcgttaccgttgcgcaggtatcaaccatatggcgttttacctggaactggagcgcaaaaccgccgacggcagttacgtgaatctctacccggaactgctggcggcttatgaagcagggcaggcaccgaagccgaatattcatggcaatactcgctgccagaatattgtgcgctacgaaatgttcaaaaagctgggctacttcgtcacggaatcgtcagaacattttgctgagtacacaccgtggtttattaagccaggtcgtgaggatttgattgagcgttataaagtaccgctggatgagtacccgaaacgctgcgtcgagcagctggcgaactggcataaagagctggaggagtataaaaacgcctcccggattgatattaaaccgtcacgggaatatgccagcacaatcatgaacgctatctggactggcgagccgagtgtgatttacggcaacgtccgtaacgatggattgattgataacctgccacaaggatgttgcgtggaagtagcctgtctggttgatgctaatggcattcagccgaccaaagtcggtacgttaccttcgcatctggccgccctgatgcaaaccaacatcaacgtacagacgctgctgaccgaagctattcttacggaaaatcgcgaccgtgtttaccacgccgcgatgatggacccgcatactgccgccgtgctgggcattgacgaaatatatgctcttgttgacgacttgattgctgcccacggcgactggctgcctggctggttgcaccgttaaggggtaatcgcttccggcgctctggtgattaagccaaagcgccgtagctggcggcaatgaaagcgagcgaggaatatcaccgtcgttaatgcgcccagtagtgcgcagaacatatcggattgcgtatcccacgggtcgccttgagtaccgagaaaatcatctgcgccctggcccattgccagcgctgcccaccactcgattaactcatacatcgcgcttatcgccagcgcgacacaacagaccagaaacgccaccattttacgcccgcgaacgtacatcccgcgcacgaggtgccaccagtgcaggcaccagcccctggaaaaaatgccccagtttgtcatacggattacggctcaaccccagccattcctgcacctcaaaaccaacggggactttcgcgtaggtgtattgcccgccgaccatcaggatgatggcgtgaaagaaaatgagcgtatagagcagcggcgttaacggataacgtttagcggtggcaagcagtagcggcacgacaataatcaccggtgtcacttccatcagccaggtgagtttgtcatgggccgaaatgccggtataaatcaggattaacgttagcgccagtgcgccggtgttaagaattaacggcttgagtgtgcgggtcatggtgagttcgcaagtcagggaaaatactgactattgaccagtaagcgtgaaattacaatcgcaaaagaggtggcccagggggatcacctggcagcatgctgccaggcgctgggccgaagaggttacttagtgcagttcgcgcactgtttgttgacgatctgctggaagaagtcgttacctttgtcatcgaccaggataaacgccgggaaatcttctacttcgattttccagatagcttccatacccagctccggataagcgacgcattccagatgcttgatgctctgctgcgccagtaccgccgccggaccgccgatgctaccgaggtagaagccgccgtgtttatggcacgcgtcggtaacctgctgactgcgattacctttcgccagcatgatcatgctgccgccgtgggattgcagcagatccacgtaggagtccatacgacctgcggtggttgggccaagtgaacctgatggataaccggcaggcgttttcgccggacccgcgtagtagatcgggtgatctttgatgtactgcggcagttctttaccggcgtcaatcagctctttcagcttggcgtgtgcaatatcgcgacccacgataatggtgccggtgagcgacaagcgggtggataccgggtattgcgaaagctgggcaaggatctctttcatcgggcggttaaggtcgactttcactgcttcgccttcacctgcctgacgcagttcttctggaatgtactggcctggattgtgttccagtttttcgatccagataccttcgcggttaattttcgctttgatattacggtctgcggagcaggagactcccatgcctaccgggcaggatgcgccgtgacgtggcagacggataacgcggatgtcgtgcgcgaagtatttaccgccaaactgcgcgccaagaccgagtttctgggcctcttccagcagttcctgttccagctggatatcgcggaacgcctgaccatgttcgttcccttccgtcggcagttcatcgtaatagtgagcgcttgctaacttgacggttttcaggttggtttccgcagacgtaccgccaatcacaaacgcgatatggtacggcgggcaggctgcagtaccgagggtacgcattttctcgacgaggaagtttttcagtttgccgggcgtcagcagggctttggtttcctggtagagatacgttttgttggcagagccgccgcctttagcgacacagaggaatttgtactcatcgccatctaccgcgtacaggtcgatttgcgcaggcaggttcgtgccggtgttgacctctttatacatgtccagcggcgcgttctgtgaatagcgcaggttatcttcgatataggtgttatagacacctttcgatagcgcttcttcatcaccgccaccggtccacacgcgctgaccttttttaccgacgatgatcgcggtgccggtatcctggcaggtcggcagcacgcctttggcggcgatttcggagtttcttaagaattgcagcgccacgtacttgtcgttttcgctggcttctggatcgtgaagaatagccgcaacctgtttctggtgtgccgggcggagcatgaaagaagcatcgtgaaaggcttgctgcgccagcagggtcagggcttctggttccactttcaggatggtttcgccgtcgaagtcggcaacgctaacgtaatcggaagtgagtagatagtattcggtattgtctttccccatcgggaaaggtgcctggtagataaagggtttgtttgacatagcttccagcctgtaactctgtatttgttattcgaaaatggcgtgccgtgtagtcacgggcggcacgcaaagtgcatttataagaacccgtacatcgcggcgaagatccagccgaagacgcacgatacgctcacaccaatcaaccccggcagaataaagctgtggttgatgacgaagcgaccgatgtgggtggtgccggaacggtcaaactgaatcgctgccagatcgctcggataagtcggcaggatgtaataaccgtagcaagccggtgctgaagccacgatgtatgccggatcaacgccgatcgccagcgcgaccggaacaatcgccgccagcgccgcagcctgagagtttacaaacttggaaaccagcagcagaacaatggcataggcccacggatactctttcaccatttcacccagtacgccctgaatttcagacatatgcgcaccgaacatggtttcagccatccatgcgataccgtacaccgccacgatggcgatcataccggaacggaagacttcgttttttgagatagacgcgggattggttttggtcaggataataatcagcgccccggtcagcagcataaacatctgaataaccagtaccatcgacagcggtttgccgccgaaggatggacgcaggtccgaatcagcaccaagaagggcgactacagcgattgccccgaggaagatccacattgccagccagttgcttttcggcagttttttatccagcagcgtcgcggtatcaccgtaaacatactcacggttttccggtacggagatgaatttttggaactcttcgtctttatccagatctttaccgcggaaccagctgaagataccgatcgccaggataccgattaacgtcgatggaatggtgattgccagcaggtcgaggaactcaagatggcgaccatcaaaggtgacattacccagcatcgcaaccagagatacgaccgcaaccgacaccggactggcgataatccccatctgtgcaccgatagaacttgccgccatcggacgttccggacggatgttgttcttaatagcaacgtcgtagatgatcggcagaatggtgtaaaccacatgacccgtaccgcaaagaatggtcagcgtacaggtcacaaacggcgcgacaattgagacatatttcgggttgcgacgcagcagcttctcggcaatttgcagcatgacatcaagaccgcccgaagcttgcaaggtcgccgatgccgccaccaccgcaatgataaccagcatgacatcaaccggtggtttacctggctgaaggtggaagacgaagaccagaatgaccagaccgataccgcctaataaacccagcgcgatacccccctttctggcaccataaaacagacatatcagtattatgataagttggatagtaaataacatgtgtgaaccctcgcgataatcctatttaaatttttgctgaatagatcacagtcacgttctgttttgtatgaactgttttcagagcctgactaaatatccgtttggtcgttaccggcttgagcaaatacctcacagtgaatattggctgattaaagcagcggcaaatttatgcactgtgataagcggctttttcagagagaaagactctctggcgatgggtttatagtttgtacagcgcagatgttaatgttttgtttgctgttatcttattgatatttatcggtctgttttttgttctcagggcaggtatcattaggtttatagattaatctgatctacccatttgtgggtaaaaatacacataatgtgggtgacataatagttaattaacttttgttagcgttttgaaattaaaaacaccgttcatctgaagagatattaatttttagcgatgatggagggataattatatttgatctggcacaagttttactgatgaacaatgtaacttgtgccaggggtattttgcattacggtaataattattacttacagataaccagcgatccgttattggcaatattgtttcagtagtgagtagtgttctgcctgaatacggtaacggtaaaccggacgccccgtgacgccataatggatactggtgaacaatatgtggcagttgaccagccagataaggtatttacggcaggaaacacgcgagatgttaacctcgttagccagctcgtcggttgaaaactcatagtcctgatgcgcgtcaatccactggcacagcgtgcgtaacgtctgcggcgttaagccttttggcaagcgacgaggatcctgctcgttggagctgctgccgtggattagctgatcaagctcggcctggtcataatactgatgtttttccagcgccattttcttttgccgccagccggtgagcgcctcttcaaagcgggaagcctggaagggtttgatcaggtaatccacaacaccgtaatgcagcgaatctttaatggttactgcatcggcagcggaggagatgacaatcacatcacttttgcaacgcgcgttatgcaggacaggcagtaaatcgagcccgttctctttttgcatatagatatctagcaatatcaggtcgataggcgtatcgctattgaagataatctctttggctttctccagcgtcgaagccgttccacagcattgaaagcccgggatttgtgccacgtatcggcgattcagctccgcgaccattgcgtcatcatcgataattaatacattgatcatctgttcgacctctccccgtcccagggtatctggacaaaaaattgtgtgaaaatcccgggttccgattccacggcgatgctgccgccgagattttctacctgttgtttgacaagtgctaaaccgacgcctcgctcgcttccttttgtcgagacacctttgtcaaaaatgtgatcgattttgtcgggtgcgatccccggtccatcatcgttaacttcgcagtgcagccagccgtgacggtagtgcaatgttacgctaatttcgccaccgggttccggccctaatgcctccagcgcgttttctatcagatttcccaacgtggtaatcagcgtcgcgacctgatcctcactaccgctgtctggcagctggctttcactgtttaaaatcagcgtatggcctaaatcggtcgcgcggttaatcttgctgattaaaaaaccagcgataaccggagatttgatcttacccagcagagagccaatctcttcctgatagttattggctgttttgagaatgtaatcttccaactgcttataactcttcagatgcaataatccgagaatcacatgcaatttattcataaattcgtgggatcgttcacgaagtgcgtcagcatagttgaccagaccgtcgagtcgctgcatcagtttacgtacttcagttttgtccctgaaggttgaaatggcaccgatgataacgccattactgcgcaccggaacggtgttgatcagtaatagtcggtccttaatcgtaatctcttcgtcgcggcgtggggttccgtcgcgtaacacttccgagacatctaccacctgtgaccacgagtggcttagcgtcgacagtttctcatcgtcctgcgacttacggtaattcagcaattcttgtgcggcatcgttgatcagcgtgacctcgccgcgatcgtccacggcaacgacgccttctttgatggactgcaacatggcctggcgttgctcaaacagtgtggagatttcgtagggttccaggccgaaaaggatttttttcagtacgttaaccagaatgcatgtgccgatcagtccgaccagcatgccaaatagtaccgaccagataatgctccagcgactgtcattgatctgttgggtcacgcggcttaactcaaggccgatcgccaccacgccaatttgtttatgattttcatcgtagatgggggtaaatacgcgtaaagcctgcgccagaaaaccgcgattgatagcgacattttcttcgccattcagcgctttaaggatgtcatcacctttaaatggctgaccaatacgctgggcttcaggatgcgagtagcgaagactgtgcatatcggtaacgacaataaacagcagatcgttgcgtttgcgcacggcttccgcgatggcctggattccactctcctgcggttttttctgcaagccctgacggatttccggcgagtcggcgagggtacgcgctactgccagagccttgttagctagcccgtctcgcgtcatatcactgatttgcgagaagtaaatcagatgcaccaccaatagcaccgagaacagtaccgcgctgaccattaagatcacagtggtactcaatttcatcggacgtttgcgtaacatacggtagggcaatgaatgtctcatcagcttccttgtgtgacaaatttcttaagcattatctctgatgaggcgggtaattcaaagggagtaagaatgattggctatattggggaagagactctggcaacggaaactgccagtgctgtatgaagattccggggctatgcttatagtgaaaaccatactgatgagagagggaaggtcatggatcaggcgctactggacgggggttatcgctgttataccggcgaaaatatcgatgtctattttaacactgcgatatgtcagcattctggcaattgcgtacgtggcaacggcaagttatttaatctcaaacgtaagccgtggatcatgccggatgaagttgacgtcaccactgtggttaaagtgattgatacgtgcccgagcggtgcgctgaaataccgtcataaataagcgagggtaaaatggaaatacgcgaaggccacaataaattttacattaatgacgaacagggcaagcaaatcgctgaaattgtctttgtgccgaccggagagaatttagcgattatcgaacataccgatgtcgatgaaagcctgaaaggacaagggattggtaaacagctggttgcgaaagtcgtggaaaaaatgcgtcgggaaaaacgaaaaattatcccactatgcccatttgcgaaacacgaatttgataaaacacgggagtatgatgatattcgcagttgatgggagagtacagagtcacgatatttttcatgctctccgcggtgtgatgcaggagagcatctgaagggtagggggatgcacaaagaatggtcagagagagcgtttttttgtcccaagtcatcccctttactgagcaaaaaaaaaagaatatctcctatatgagaatcatcattcggggttaataagttttgcgtccccagagcgttcaatattgataggagtcatattatggaaggtaaaaacaagttcaatacttatgttgtttcttttgattatccatcatcttattcctcagtgttcttaaggttaagatcattgatgtatgatatgaatttctcctctatcgtggctgatgaatatgggataccacgacaactgaatgaaaactccttcgcaataacgacatcgttagccgcaagtgaaatcgaagatttaatcaggctcaaatgcttagacttaccggatattgattttgacctcagcattatgacagttgatgactatttccgtcagttttacaagtagccaggaaggataagaagaacataaaaaatggcactattctctaaaatattaattttttatgtgattggtgtgaacatatcctttgtcattatctggtttatctcacatgagaaaacacatattcgtttacttagtgcatttctggtcggaataacctggccaatgagtcttcctgtggcattacttttttctctcttttaggagctgtagttgagtggacccgctggttatcttgaaacgaagcgtctctcctcaaaactggatttgcggaatgacgaacgaagcagtcgcctgactgcttcgttcattaaagtgaaatttatttctgtgggcgcatcgccgggaagagaataacgtcgcgaatagtatgactgtttgtaaacagcataatcattcggtcgataccaatacccagaccagcggttggcggcagaccatattccagcgcagtcacgtaatcttcgtcatagaacatggcttcgtcgtcacctgcagctttagcgttaacctgttcctggaaacgttcagcctgatcttctgcgtcgtttaattcgctaaaaccattaccaatttcacgaccaccgatgaagaattcaaaacggtcggtgatttccgggttaacatcattacggcgcgccagcggggacacttctgccggatattccgtaataaaggttggctgaatcagatgtgcttctgccacttcatcaaagatctccgtaacaatacgtcccagcccccagcttttctctaccgtaataccgatagattcagctaatgctttagcagcatcaaaattatccagatccgccatatcggtttctggacgatattttttgattgcttcgcgcatggtgagtttttcaaacggtttgccgaaatcaaacacatgctcgccataagtgactttagtggtacccagtacctcttgtgccagggtgcggaacagtgactccgtcagttcaatcaaatcgtggtaatccgcatatgccatgtagagttccatcattgtgaactcaggattatggcgaacagaaataccttcattacggaagttacggttgatttcgaatacccgttcaaaaccgcctacaaccagacgtttcagatacagctccggcgcgatacgcaggtacatatctaaatccagagcgttatgatgggtaataaacgggcgagcagatgccccacctggaattacctgcatcatcggggtttctacttccataaagccgcgcgcgaccatgaactgacggatagcggccagaatttttgaacggacaacaaacgtttgacgggatttatcgttagcgatgaggtccagataacgttgacgataacggacttcctgatcctgcagaccatggaatttatctggtaaaggacgtagtgctttagtcagcaggcgcagctcagtacagtgaatggaaagctcacccgtttgcgtcttaaacagcgtaccgcgggcaccgataatgtcacccagatcccattttttaaactgatcgttataaacaccttctggcaggctatctcttgcaacgtacagttgaatacggccaccgacatcctgcaacgttacaaaggaggctttccccataatacgacgggtcatcattcggccagcaaccgagacttcaatgtttaaggattccagttcctggttatccttcgcatcaaactcttcgtgcaactggtcagaggtatggtcgcggcgaaaatcattgggaaacgccacaccttgctgacgtagtgccgccagtttttcgcggcgatttctcagttcatcgttaaaatcaatagcctcattggctccccgtgtttctcgttcagacattttggttcctctaaatccagctttcaatttagcgtagataaagagacagatcggtacactgtattatctgcctcgactattaataactcagtttatcttatcgaaactaacgcttacctcaagttgatatcactaataaataaccatcaaaatggtttaaatgacttattaatctcgatttactagtgtgataaactgaaagttaatttattcataaccaattgtttttacgacagttaatcgttgctctcctgtatcatattcgtcggcgtgctaaacagaaaacgggtagcaaaggccaataccacgatgatcgcgacacaagccaacgtccactctcccatctgagaaaagaatcgctggtaagcggcaattgccataccgctaatttgcgactctgtcgtctgctgtgccacgacgcctgccagccagttggcgaccgcgcctgttgccagcatataaataccggttaatacgccagacattttcagacgcgtgatttgcgcaatcgccaccgggtcaataaagagttcagcaaagcccattagcgccagcccggatatcatcacgcccattgacgcttgaccgccagccgctgcatgtcgggcatcaaatgccagcaacataaagccacaagccatcagcagtaagccaaaggcaaacttcagccagacgcgcaatgctgaattgccgcggctttctggcgacgccagccaggccagaacaaccccagcgagcatcaccgcaatagcattcaccgactggaatagtgctgtaggtacttcaatattgaatgcctgacgattcacaaagcgatcgataaacaagctgatggtactgccgccctgttgtgccagtacccagaacaacgtcccgacaaacatcaacaatacaatttgccaaagagcacggcggtgttcggggaatttgatcatcatgcgggcaatgatttgtgcggcaatgaggcaaacgatcgccagcaaatatccggaccagtcgttctccagcagcagggtaaaaaatactggggctaaacagagcatcaccactaaccagctccatactggtaaggcaaatttcacgctagtgagcgctttcttatccatactacgcgtggactggaaatgacgatgaccgcttaagaaaatcaacaaaccgataaacatgccgccacccgcaagggcaaagccaacatgccatccataccactgagcagccaggccgcaggcgatgggggctgcgatagaaccgatattgcccgcagcatacagcagcgaaaaaccgccatcacgtcgatgatcgttctcgtcgtagagctcgccaagcaaacagctgatgtttgatttgaataaaccgtagccacaaataatgattgccagcgccagatacaggctaaaggttgaatttgtatcaatgcccagcaccacatggccaagggtcattaacagcgcgccggcaatcactgcagtgcggttgccgagcaggcggtcggcaagccagccgccgagaataggggtaacgtaaaccagagaagcatatgcgctgaacaggctgatggcatggttatcatcaaaaccaagctgatgggtgagatagagaatgagtaaggcacgcatgccgtaaaaactgaagtactcccagatttggatcgccacgatatagtatatcgcgcgcggctgtgagggtgttttcatgtgttctccttatgagcaaaaaagggaagtggcaagccacttcccttgtacgagctaattattttttgctttcttctttcaatactttaacggtatagcggccatcagcctgacggtatgcaccgtgaatatcggtttcaaagcccggatagtgagcgccgatttcacacagcatctgcaggaactccagaaccggacggctttcttcggtgatcatttcacccggcattaccagaggaactcccggcggatacggaaggatcatattggcgttaatacgaccgaccatttcgtcgaggtaaacttcttcggtcataccgtgcagctctttctggaacgcagcatacggagtcattaccatagtcggcagaacttcaaatgcgcgatacatcagatccggcagattgtggtgaacaatcagtttgtggatattctgagccagttcctgaatacgcatgttttcatagaattcaggatcttcacgatacagagacggcagcatgtttttcacacgcaggttcaggtcgaacgcacgtttgaagtcagtcagagcacgcagcaggctcagtgctttggtcttatcgataccgatgctgaacaggaacagcaggttatacggaccggttttctcaacaacgatgccatgttcgtcgaggtatttcgccacgatgctggccggaataccaaagtcgctcatggtgccgtctttttccatccccggagtcagcagggtgactttgatcgggtcaagatacatgtgctcgttatcgatgtttttgaagccgtgccatgtgctgtcagaacgcagcggccagcattcagtcgtatcgatatgatccggctgccatacatcaaagaaccagccatcagattccgttctcagacgtttgatctctttacggaatttgatcgcacgttcaatggaaccattgatcagacgtttacctgcattgcctttcatcatcgccgcagcggtttcagtggacgccacgataccgtagtgcggagaggtggtggtgtgcatcatgtaggcttcgttaaaggtttcttcgtttacgtcacctttaacgtggatcatggaagcctgagagaacgccgccagcagtttgtgagtagactgggtttcgtaaatcactttcccttctacacggccaccgctcataccgcatttaccttcgtaaatcggtgagaagttggtgtaaggcacccacgcggagtcaaagtggatggatttcacatccagtgttttcttgatgaagtcggtgttgtacagcagaccatcataggtagagttggtaattacagcatgtaccggccaggttgcgtttggtgtttctttcacgcgcttagcaatggtagcgtgctggaattcactctgtgggataccaccaagaataccgtaagcgttacgggtcgggcggaaatagattggcgtaacatcgctcatcatcatcaggtgggtcagcgatttgtggcagttacggtcaatcagaatggtgctgcctgccggagcagagtacataccaacaattttgttcgcagtggaagtaccgttggtcaccatgtagctgcggtctgcgttaaagacgcgagcgatatactgttctgcttctttgtgtggaccactgtgatccagcagagaacccaattcagatactgaaatggaaatatcagatttcatggtgttcggaccaaagaaatcatagaacaggctacctaccgggcttttctggaatgcagtaccacccatgtgaccaggagtacagaaagtatatttaccttcacgaacatatttaaacagtgctttggtcagcggaggcagaatagtgttgatatattcgtcagtggtctgcttgatcttgttagcaatatcatcagcagcacccagcgcatattcaaagaagctaatctgtaaacgcaggtcattcaggcttacatcgagagtggaatacgtattagcgaacgcgtacaacggcaggttctcgttcattttgctaatttcttcgcacagctcgagattatatttatcccagtcaaaaataacgccgcacagacgcgcattgttttcgatcagttttaataagtcgtcacggtcgttcgggtaaacaatctggaagttcagacgttcaagcgcgcgatgaagttcacggatgggttcttctttaaaataaacccccatgtgattcaatattgcaataacgttcatagtcatatctccaggtaaaaaaggcccctcccaacacatgggacaaaatgaaaggaggagcctcggaaaatacttttaattaatgtgcgttagacgctgtgtggttatccattgagtggctctggcgctcgtgcattttgcgagcgtagaacatcaggataatcaggctgacgatgaaggtacctgccagctcgaaggagcttgcgcccatcagcgcgatgaagcagaacacgcaacccagtacagagcagatcaggctgacaaagttgcggatgttaacgccttcaaaacgaatcaggtcaacgcaagagtagaagtacggcagcatagtcagcagtactgcgataccggtcagttcaccgaacaggtcagatgctttaccaccggcagagttcatcagagtgatgaggatcatcagggcagtcattttcactgcagccagcagcagaccttttttcggaataccgttgctgtcgacttcaccataaactttcgggaagttaccgtcgttagcggcacgtacacctgcctggcctaccaacatcatccaggagcccagagaagtcagacacgcaaaggcggtgaatgcagaaaccagtggcgcagcccagttaccgaggatagttgaagcactgattgcaaacggagcaccggaagccgccattacagaagacggatacataccggaaagcacctgagtcgcagcgatataaacaatacctgctaaaccagtacccagcatggttgccagcggaacggtacgtttcgggtttttaaccataccagtacttactgctgcggattcaacacccacgaaggcccacaggcagagcagaatacttttaatgatcgcatgaccatcagtggtatccgcagtattccagttagctgcataagttgctgcatcaaaccaatgccagccaacaatagcagtcatcaccacaggaataagaaccagcaccagaccaatagtggttaaacggcttacccaggtaccgccgagcatatttacaaaggtaaatacccagacgatagcaatacaggcgatacccgccggaacaggatcatttaatactgggaagaaggtggaaagataagatacagcggtaataccaattgccaggttaccaatccagttagcatggtaataaagaacacctgtctgaaaaccaaatgcaggggaaatttctccggcatacgcaattgggccaccttgttgcgggttttttgttgccagtcgggcatatacatatgccagcgacattgcaccaataatagagataatccaaccccagatagcaataccaccgatacttgctaggttcgcaggtaataatgcaataccgctccccatcatattaccggcaacaacaccggtacaggcaaatagcccgatcttcttggcagaactcatgctcttctcctaatttcatttttgaatttggagtccgggtcatgatgtataactatttcctgaccagaccaaactggcgctaagattactcacgaaaaaaggattaatcctaaagattaggtgaaataacacaaaagtttctgtaagtgagaacttgaggttttttattaacacatcaggatcgcaagttgatatcatgaaaagataaacattcaatatttacaatgtgttatgtgacatcttctggttaaatttatgtaataaaaattatgcggcaaataaattgccgcaacatattataccaacgggaacatacaaaaactcaccaacaaatattcccgagcatgaatcaacccgggagttacttattctgaagcgagaaatttgtcgagataaggtacaacataaggaacagaagtctggaatataccattttcaatccagtaaagggtgtttgcccctgggcgtaaattaaaggcggtgagatatgcatcagctgcttcccggttcatccccttcatttcataaaccttgccaagcaacacataatttagccaggacatttcaagatcaatgccggtatttatcgcctgataagactcatctgttttaccttttaccagggcactgaccgcttttatttgatatataatggacaggttgttcaattccggcagtgtaacaatgttatctatttctgtgttcagtgctgctaattgtttttcgtctaaaggatgttgagaatggcgcacgatatcaactaatgctttttctgctctcgcgtaggtaaattctggggatgattgaacaatctcacctaataattcactggcacgatccaatgatttatcatcaccatgcagtaaataatcatgtgcctgataaaaattagttaataacgcaccacgatgcggcaaaatttgctggagcatctcctgcattcgttgtggccacggttggtttaacgcttttgataaactctggagcaaatcattttgaatcgccagctgattaccgttagtgatgacataacgtttatccagcatggttgaaccatctgcattgtctaccaattttaccgacataaagcattgttgagcacggtattggcgctgattaacaaacgcaatagataatgttttaccggaactgctcggttcatcaatgttgtagttgattttgtcatgcaccataaaggtggagaaggtgttaagtgatgtcgccaccaaatcacccacgcctatcgcgtaagagagctgatacggagaactccagctgttacaactcttattaaccatattaatgtcaatatcgcgtggattgagcaaaatgcgcgatttactcataggaagacgtgtttcaagacttgaaaacgctaccagtgcgacacagatacctaacgacaacaggaaaaaaaaccatacccaaaaggtagtgaatcgtttgcttttaactggggattgttcaggtggcgttgtggtgttttgaatgttaagactgtgggagggagaatctgtggcaggaaccgcctctggtatagggggaggcgaagatagcattatttcctctccctcttcttcgctgtaccagataaccggcaccattaatttatagccgcgctttggtacagtagcgatatagacaggactatcttcatcattatcttttaatgacttacgtagttctgagatactctgcgtcacaacgtgattggtgacaatacttctcttccagacattatcgataagttcatccctgctaagtacttcgccactgtgttgagcaaagaaaaccagaagatcgattaatctcggctcaagggtaagttgacgcccattgcggctaatttggtttatggacggagtaacaagccattcgccaacgcgaactacaggttgttgcataatagaaactcattcgaaaagggaatgatgcaatgataattgccataacctattttttccatctatagatgggtttatttacatattattggtgaatgcaagacgttatttttacccgccataaacttcttgattacatagtattacgaaaggattttactgagaaccagaagtaatattccttatcatcaaaattcatcatctttgccaaagaaaaatgttcagaaaataatccatgaaaaattgtccggagcgcttactattttaatggattgttagtctttgcatgagcaagtggaccgatacatttctctttgttctcattcagaaaatctcatcagttggcgttcagaccgatgttgtgctttatggatgcgttacgctcctgatgacgtcatttgacgttcaacagcatcacggggccgcacgacatttcacgtcagtcagcgctatagctcagaaacaaattttcccgaattgggatatgcccgcaaattgctggtgatgtggggagaatctggttgagttcggtagaattgatttggcggcaggacgcttaaatcgtggcgtcctgaaacgaaaaacggacctccgtggaggtccgtttatatgaatttggtgcccggactcggaatcgaagccaaatttacaggggcaattggttttgtaattccagctcagccctctgaagaggttgatcacacctcgctcaaacacgtcatccttattctggtgnagntgttcaaacgtactcaggatattcncntcnctgatttccggaaagttatcgtactccagtgancggtaccatgtatcangggnctgcgcatccattaatgacagcatcccgganngttgcatcaggtcacgccagatttcncgntcnagnttgcgggtnatggctttcattgcggtttccggtttctcnntnagccagcanccncagcgaaaatcctgtttcatngcccagtccagngcggttttaccnccaatactttctgtcantnntgagatttcngccagttgccggataagtgtgtcgatttgcagcagngnactctttcgtacagccagaatgtggcggatactggttgagcagataacgtccgtatgnccgttgaccanttccggncgggagnnnnnnnnnnnnnnnnnnnnnnnnnnnnnnnnnnnnnnnnnnnnnnnnnnnnnnnnnnnnnnnnnnnnnnnnnnnnnnnnnnnnnnnnnnnnnnnnnnnnnnnnnnnnnnnnnnnnnnnnnnnnnnnnnnnnnnnnnnnnnnnnnnnnnnnnnnnnnnnnnnnnnnnnnnnnnnnnnnnnnnnnnnnnnnnnnnnnnntgacagcatcccggagcgttgcatcaggtcacgccagatttcacggtcaaggttgcgggtaatggctttcattgcggtttccggtttctcagtcagccagcaaccacagcgaaaatcctgtttcatggcccagtccagtgcggttttaccgccaatactttctgtcattgatgagatttcagccagttgccggataantgtgtcgattngcancagtgtactctttcgtacagccagaatgtggcngannnnggtngannagataacgtccgtatgcccgntgaccacntccggncgggagantgtgntnncngacatnatcnntnttcctttnngnnnataaatgaaaangccagccntgttcaggctgncgtcagggaagtgaaatcgggtgagtgatcttcactggttctggtacaaaagttactgttggcgcagggtacggataccctccctggcctgtgcgatacagggcaacagtgctgccgaatctgttttatcctcatcgttgtcgaagataattcccgattcgcagtcgatattgtcctgcagccacgtaatcagaatatccagcgctgtttccgtggttaatgatttcatgttgtgaatttccggattaccagtcgaaagtgggtaaacccggcagatatccggcactggcatccagatgaatgagactgacaccataacaccggatgagtgtgacgaccagacgacggaacgtttttgacagccccaggcgcttaagccgcagaaccgggtatgaccacgtatcggtacgtaacagataaccggtaccggtaaaatgaatccattctgattcaccgaagtcactggtctggtgtgacagcgagtacagccaggcgttgtccgtttccgtgatatgtgcggtactgcagcgtatgccggtaagggcaacaaatggtggcgtgcagtctgctgaggtccggtcagattcatcaacaacacgaagggagtagccgttatcgcagaccatgttaatcagttcagcgagattaacaccatcaatgtcaacgacaatgcgccccatgttcagcgcctgcacgttaacgctgtcggcttccagcgtcagggccagtttcatcgtttcgcctccggatgcttccccagggtaatgttatttaccgttctgtaattgtcgcggatcatcaggcctgttgcccggcgagcccggaggatatcgatgctgtttattaactgagagtgggtacaggcgctgaatcccggcaggtcggtacgtaccagtgcgtatttttccacgagaaagttcactgcatcacacagtgaaatgcctgcctcaatatgctgctcaatcacacgttcatcagcgaacggtgtgtcattcagcgtaaggccgtagtgctggtccagcagtcgggtgagcagtgtctgccagatggtgactggagacgggcagcacgatacctcccgtacatgcgtgtcgggtaatgttttcatactgaagattttcctgatatgcagagataaaaaatgggacagtggcgtggtgaaaacaccaggccggagcagaaggttattctggtggtttactttttcgtttcaggtgtcggataaacagccagataaacgtaaccacaggagccgagggtgtcggcttcacaggtcagccccttcgcatacagtgtcacggtatgctgatggcggggattcagttcaccactggtgagcattaatttcagttgtttcatcagcagcggaaaggcctggtccagagggtacgcatccgcatctctgaaccggcctctgataccggcacggtcggcaaggtaatgcaaccggttaccctcctgcaccagacgggcgccgaaacagggcgtcactgtgcagggtagtccccaccagggatggtcgtcattgtcatcgggatgcgttgtcccggaaagtgtgtctgacacgataaaatcctcacagaaaatcggtgaatgatagtttaacgatgacgggtcagccggcgcgcagaccggcttcggtaaaggtgtattcgttgatgagcaggacctcatccacagcggcgtctgagctctgccagtcgtactcgttttccgggtgangnaacatcagttcagggtgacgctcatcagccggacatacggaccaaaactgtccttacggcgttctgcaaacacggccagcacaccgggaatatcctgcacttcacgaccggtatacgcttcagcactgccgtgccagcggtatttgccggtacagaacggaaaaagacgggatgccggatgctgacggtgaatacgcatggcttcgccacgggtgatgattttcatagtgggatacctctgaagacagaagataaaagtgaaaacaggtgtgatgtggttgtgacgggttaaagcagaccatattcggcaaaggagaaaacctggctgccaccgactatcagatggtccggcacccggatatccaccaggcccagtgcctgtaccagacgttccgtgataaggcggtctgccttgctgggtgtgacttcaccggacgggtgattgtgtgccagcaccacagcagcggcattgtgatacagggcgcgtttaatcacttcccggggatggacttccgtgcggttgatggtgccggtgaagagggtttcaccggcaatcagctgattctggttgttcagatacagcacccggaactcttcacgctccagtcccgccatgttcagaatcagccattctcgtgccgcacgggtggaggtgaaggccacgccgggttcatgaagatggcggtccagggttttcagggcccgttgaatgaggctgcgctcgccgggcgtcatctctccgggcagaaaggaaagctgttgcattgtacttctctccattcagtcgatgatgcgcataatggcgctgcattccggatgctgcagggcgtaatcccgcagccggtaataatggaccgtcatggcataacactccgtacgacaggcatgatgactgtacgtcatcagacaggcagcaatgccggcggcttccgggctcatttcagcgcggttaccgttcatggcattgaacagtacccatgtttcgtcatcatcgtcatccggttcgggtgccataaatgccccgccgttgttcagggtgtacagattccagataccaccgcagtagtcttcacacagacggtccatccagccgaagatacggggctccagggtcacccactgtggaatgaggccaaagtgctgcggccagaagctgatgnnnnnnnnnnnnnnnnnnnnnnnnnnnnnnnnnnnnnnnnnnnnnnnnnnnnnnnnnnnnnnnnnnnnnnnnnnnnnnnnnnnnnnnnnnnnnnnnnnnnnnnnnnnnnnnnnnnnnnnnnnnnnnnnnnnnnnnnnnnnnnnnnnnnnnnnnnnnnnnnnnnnnnnnnnnnnnnnnnnnnnnnnnnnnnnnnnnnnnnnnnnnnnnnnnnnnnnnnnnnnnnnnnnnnnnnnnnnnnnnnnnnnnnnnnnnnnnnnnnnnnnnnnnnnnnnnnnnnnnnnnnnnnnnnnnnnnnnnnnnnnnnnnnnnnnnnnnnnnnnnnnnnnnnnnnnnnnnnnnnnnnnnnnnnnnnnnnnnnnnnnnnnnnnnnnnnnnnnnnnnnnnnnnnnnnnnnnnnnnnnnnnnnnnnnnnnnnnnnnnnnnnnnnnnnnnnnnnnnnnnnnnnnnnnnnnnnnnnnnnnnnnnnnnnnnnnnnnnnnnnnnnnnnnnnnnnnnnnnnnnnnnnnnnnnnnnnnnnnnnnnnnnnnnnnnnnnnnnnnnnnnnnnnnnnnnnnnnnnnnnnnnnnnnnnnnnnnnnnnnnnnnnnnnnnnnnnnnnnnnnnnnnnnnnnnnnnnnnnnnnnnnnnnnnnnnnnnnnnnnnnnnnnnnnnnnnnnnnnnnnnnnnnnnnnnnnnnnnnnnnnnnnnnnnnnnnnnnnnnnnnnnnnnnnnnnnnnnnnnnnnnnnnnnnnnnnnnnnnnnnnnnnnnnnnnnnnnnnnnnnnnnnnnnnnnnnnnnnnnnnnnnnnnnnnnnnnnnnnnnnnnnnnnnnnnnnnnnnnnnnnnnnnnnnnnnnnnnnnnnnnnnnnnnnnnnnnnnnnnnnnnnnnnnnnnnnnnnnnnnnnnnnnnnnnnnnnnnnnnnnnnnnnnnnnnnnnnnnnnnnnnnnnnnnnnnnnnnnnnnnnnnnnnnnnnnnnnnnnnnnnnnnnnnnnnnnnnnnnnnnnnnnnnnnnnnnnnnnnnnnnnnnnnnnnnnnnnnnnnnnnnnnnnnnnnnnnnnnnnnnnnnnnnnnnnnnnnnnnnnnnnnnnnnnnnnnnnnnnnnnnnnnnnnnnnnnnnnnnnnnnnnnnnnnnnnnnnnnnnnnnnnnnnnnnnnnnnnnnnnnnnnnnnnnnnnnnnnnnnnnnnnnnnnnnnnnnnnnnnnnnnnnnnnnnnnnnnnnnnnnnnnnnnnnnnnnnnnnnnnnnnnnnnnnnnnnnnnnnnnnnnnnnnnnnnnnnnnnnnnnnnnnnnnnnnnnnnnnnnnnnnnnnnnnnnnnnnnnnnnnnnnnnnnnnnnnnnnnnnnnnnnnnnnnnnnnnnnnnnnnnnnnnnnnnnnnnnnnnnnnnnnnnnnnnnnnnnnnnnnnnnnnnnnnnnnnnnnnnnnnnnnnnnnnnnnnnnnnnnnnnnnnnnnnnnnnnnnnnnnnnnnnnnnnnnnnnnnnnnnnnnnnnnnnnnnnnnnnnnnnnnnnnnnnnnnnnnnnnnnnnnnnnnnnnnnnnnnnnnnnnnnnnnnnnnnnnnnnnnnnnnnnnnnnnnnnnnnnnnnnnnnnnnnnnnnnnnnnnnnnnnnnnnnnnnnnnnnnnnnnnnnnnnnnnnnnnnnnnnnnnnnnnnnnnnnnnnnnnnnnnnnnnnnnnnnnnnnnnnnnnnnnnnnnnnnnnnnnnnnnnnnnnnnnnnnnnnnnnnnnnnnnnnnnnnnnnnnnnnnnnnnnnnnnnnnnnnnnnnnnnnnnnnnnnnnnnnnnnnnnnnnnnnnnnnnnnnnnnnnnnnnnnnnnnnnnnnnnnnnnnnnnnnnnnnnnnnnnnnnnnnnnnnnnnnnnnnnnnnnnnnnnnnnnnnnnnnagcagcatttacaccaaaagacaccactgccatagctaccgcaccggcaataaccgacttaatcataaataacaacctctttttcattactgaacacaccagagatatctggcaatttaaaatgacccgattacctttaataaccagatcaatacaaataatattctcgtattttcagggcaggttatttatcgacagaatactgatataacctgtctgctttctgacaagggcttctttttttatcttccagaaactccggaatgccataatttagtcaaatgccgatgactcatctgtataataaggtgcaagccttgctgcaagagcattcagccgtataagtctccccagtgttgtactgaaatacccattattcatctggtatttctcgcagacctccttacgggagtgcccacctaccagatagtccttcatagccagaatgaccctgtcactgtgaatagaagaaatacctatcagtaaaaaaaatgcatttcagacatagagccgagcaacagcacgctctcgcgtatattcagcaaaaacgcatttcctgaccgactgatgacttcatgatgcgccatgtttcccccttctgtcgggcccctggatatatgcttccggcccggaaatactcttcacgcaataagttaaatttagttttttatgttgtaaatattgatttaaacgatcttttaacccacaaaacaaaattaaaccagaataaaattctaacaacaagaatacactcagataaaaacatcatggtgaattgaatttacagcataaaagatcgtctaaatgcatttttacggactttcttttcacagaaaaataacacacaaaatgtgatacacatcaaataaagccaacaaaaagcaaattcactaaattgcacaaataaagcaaacacagagaataaaaatacctttccgttgataacagagagcatgatttttattattcgaagaaactttgttacagtgagatgagtgaatatatgaagaatgaaatactggaatttctgaacaggcataatggagggaaaaccgcagaaattgcggaggcgctggcggtaacggattatcaggcacgctattacctgttattactngaaaaagaaggtgtggttcagcgctctccattaaggcgagnnnnnnnnnnnnnnnnnnnnnnnnnnnnnnnnnnnnnnnnnnnnnnnnnnnnnnnnnnnnnnnnnnnnnnnnnnnnnnnnnnnnnnnnnnnnnnnnnnnnnnnnnnnnnnnnnnnnnnnnnnnnnnnnnnnnnnnnnnnnnnnnnnnnnnnnnnnnnnnnnnnnnnnnnnnnnnnnnnnnnnnnnnnnnnnnnnnnnnnnnnnnnnnnnnnnnnnnnnnnnnnnnnnnnnnnnnnnnnnnnnnnnnnnnnnnnnnnnnnnnnnnnnnnnnnnnnnnnnnnnnnnnnnnnnnnnnnnnnnnnnnnnnnnnnnnnnnnnnnnnnnnnnnnnnnnnnnnnnnnnnnnnnnnnnnnnnnnnnnnnnnnnnnnnnnnnnnnnnnnnnnnnnnnnnnnnnnnnnnnnnnnnnnnnnnnnnnnnnnnnnnnnnnnnnnnnnnnnnnnnnnnnnnnnnnnnnnnnnnnnnnnnnnnnnnnnnnnnnnnnnnnnnnnnnnnnnnnnnnnnnnnnnnnnnnnnnnnnnnnnnnnnnnnnnnnnnnnnnnnnnnnnnnnnnnnnnnnnnnnnnnnnnnnnnnnnnnnnnnnnnnnnnnnnnnnnnnnnnnnnnnnnnnnnnnnnnnnnnnnnnnnnnnnnnnnnnnnnnnnnnnnnnnnnnnnnnnnnnnnnnnnnnnnnnnnnnnnnnnnnnnnnnnnnnnnnnnnnnnnnnnnnnnnnnnnnnnnnnnnnnnnnnnnnnnnnnnnnnnnnnnnnnnnnnnnnnnnnnnnnnnnnnnnnnnnnnnnnnnnnnnnnnnnnnnnnnnnnnnnnnnnnnnnnnnnnnnnnnnnnnnnnnnnnnnnnnnnnnnnnnnnnnnnnnnnnnnnnnnnnnnnnnnnnnnnnnnnnnnnnnnnnnnnnnnnnnnnnnnnnnnnnnnnnnnnnnnnnnnnnnnnnnnnnnnnnnnnnnnnnnnnnnnnnnnnnnnnnnnnnnnnnnnnnnnnnnnnnnnnnnnnnnnnnnnnnnnnnnnnnnnnnnnnnnnnnnnnnnnnnnnnnnnnnnnnnnnnnnnnnnnnnnnnnnnnnnnnnnnnnnnnnnnnnnnnnnnnnnnnnnnnnnnnnnnnnnnnnnnnnnnnnnnnnnnnnnnnnnnnnnnnnnnnnnnnnnnnnnnnnnnnnnnnnnnnnnnnnnnnnnnnnnnnnnnnnnnnnnnnnnnnnnnnnnnnnnnnnnnnnnnnnnnnnnnnnnnnnnnnnnnnnnnnnnnnnnnnnnnnnnnnnnnnnnnnnnnnnnnnnnnnnnnnnnnnnnnnnnnnnnnnnnnnnnnnnnnnnnnnnnnnnnnnnnnnnnnnnnnnnnnnnnnnnnnnnnnnnnnnnnnnnnnnnnnnnnnnnnnnnnnnnnnnnnnnnnnnnnnnnnnnnnnnnnnnnnnnnnnnnnnnnnnnnnnnnnnnnnnnnnnnnnnnnnnnnnnnnnnnnnnnnnnnnnnnnnnnnnnnnnnnnnnnnnnnnnnnnnnnnnnnnnnnnnnnnnnnnnnnnnnnnnnnnnnnnnnnnnnnnnnnnnnnnnnnnnnnnnnnnnnnnnnnnnnnnnnnnnnnnnnnnnnnnnnnnnnnnnnnnnnnnnnnnnnnnnnnnnnnnnnnnnnnnnnnnnnnnnnnnnnnnnnnnnnnnnnnnnnnnnnnnnnnnnnnnnnnnnnnnnnnnnnnnnnnnnnnnggttgatgtggggagaatctggttgagttcggtagaattgatttggcggcaggacgcttaaatcgtggcgtcctgaaacgaaaaacggacctccgtggaggtccgtttatatgaatttggtgcccggactcggaatcgaaccaaggacacggggattttcaatcccctgctctaccgactgagctatccgggcaacggggcgcattaaaccgtaatctgcacatctcgtcaacctaatttcagtaaaagcgattcaactgcttaagattgcggcaaatcgcttcttttctgtgtttctgtcaggtcagtgcaccaccctgacggcagcgggcgaagcgcaggatatcttccgccagccgatgtgcggtgtcgacatccgcctggctacgattcaccagcattcggcttaaacagccttccagcaccagttccatctgctttgctaccatcgccggatcgtcaacttccagcgtggttaacagttcgtgggtgaaatcgtaggccgcgcttttttgctgatcggccagttgatgaatagggtggccaggatcggggtaaaacgtacaggcagcgataaacagacagcccggatagcggttgtttttaacgcactccgataacgcctgataacgtgccagcaacttttgttcggcggtttgcgtttcgtccagcatcagctgacgacgccagacatctatctgttggctaagataacgcagcgcatcgtagaggattgcctctttgtctggccagaagcggcgtagctcgtccagtggataatccacacgttcagcaaccatctccagcgtggtgttggcaatcccttgtaattctaataatttcagggcttctcccagtacatcttcacgttgcacgctattttcctccgtctttcccactgcaagtgtcgttcacggttggcgatcgcgcaaatgtgcgctgaaggtttcagcatccataaagcccgtgacgcgtgcttgtggatgctcctggccttgtccgtcaaaaaagagaattgtcggtaggccaaggacattaagatgctttaacagcgccatatcttgtgcgtcgttggcagtgacgttggcctgaagtaagaccgtatctgctaacgctttttgcacctgcgggtcgctgaaggtgtatttctcaaactctttacaggcgacgcaccagtcggcatagagatctaacatcactggtttgcctttggcttcaacgagcgcctgatttaactcatctaccgttttgatttgtgtaaagttgagatgcgtctgagtttgcgcggtatgtgttgcaccaaatgcccaatcctgaagtgggcgtacgctaaccaatgccgctgccagcaggattatttgcaccacgcgcatccagccgcgtttggcctgtaggctggtgataaaggcccagccaaagaatgcgacaccaagcgccgaccacaagcgtaatccccatatatcaccaatcactcgctccagcaggaagaccggcagtgcgaggatcacaaaaccaaacgcggttttgacttgttccatccacgggccgcttttcggcagcaagcggttaccaaagacggtaattagcatcagcggcaggcccatgcccagcgcataaagataaagcgtgccgccgcccagccacatgttcccgctttgggcgatatacagcagaatcgcgctaagcggtgcagtggtgcatggtgaacagatcagtccggcaatcgcccccataataaacacaccgccaggtgagccgccctgttggcgattgctcatcagcgtgagacgtgtttgcagcgaagaggggagttgcagagtaaacaagccaaacattgacatcgccagcaaggtaaagacgatggcgaggccaatgagcacgtatgggtgctgtagcgccgcctggaactgtaaccctgcggcggcaaccaccagacccagcgccgtgtaagtcagcgccatcccctgcacataaataaaggtcagcaacaatgctctggcagtggaaagccgctgtttaccgcccagcacgatgccagaaatcagtgggtacattggcagcacgcatggcgtaaaggcgataccaataccgatcaacaacgcccagagcgcggaaaagggcaattgcgcggtgggctgctcttgctgcggaacagacacaggctgtgacgcttcgttgttagcgaccacttcgcttaacggaacggttttggtttctggcggataacagaaaccggcatcagcacagccctggtaggtgacagttaacgttgctcccgcactcgcctggttgatggttacgggaagcgtcagccgatcgcggtaaatctcgcttttgccgtaaaactcatcttcatgccagacgccttgcggcagctgcacgtcggcaattttcgcgtgttccggcgtaatgcggatctgtttacggtagaggtagtaaccgtctttgatctgccaggtcagattcaggtcatgttggttttgctgaaaatcaaaagcaaaggcttgatccgcggggacaaattgtgaacgtcccggcgcgtcgaataatccggcaaaaacggaagtgctgcaaagtagcaggatcagcgtaaagatgcgttgagccatgagaggtaatctgtgtctccgtgtgtaacaggtaaaaccagaagttccggggtttgatatggatgatgagacttcaggcattccagcagtgcctgctggtgagatacggtagtttttaaaatcatctgcacttcgtattcttgctccagcttaccttcccagtaatagagagaggtagcgccggggatcaaggtcgcgcaggccgccagtttttccgccagcactttggcggctaaatcctgggctgtcgcttcatccggtgccgtacatagcaccacgacagacgtggtattcgaacttttttcatcaagcataaacacctcgcaagaacagatggaaccgcaagagagaggtcactatacaacggacggggaaaggatgttagtcggcgggaaagaaagcggggcgtgaacgccccgcgatgggtcattacagcatgaagctacccagcacgaagccgaagcaaacggccagggcaacacccagagtacccgggatgaagaacggatggttgaagacgaatttaccgatacgggtagtacccgtgtcatccatctgtaccgcagcaaccagcgtcgggtaggtcggcagaatgaacagaccagacaccgcagcaaaagaagcaacagcagtcagcggagaaacgttcagtgccagagccatcggcatcagtgcttttgcggttgcagcctgagagtacagcagagcagaagcaaagaagaagatgacggccagcagccacggatgaccctgaatcacttcaccagcggtatctttgatccagtcgatgttgttggaaacgaaagtatcgcccagccacgcaacacccaggatacaaatacaggcgctcatacctgctttgaaggtgctggagttgagaatgttgtcggtatcgactttacagataacggtggtcagagttgcaacgctgagcatgatgatcaggattgcgttggtggtgttcatcagtggtttttcaaccagacccatgcttgggctgttgatgattgcatagataaccacgccaactacgcccagcaggaacagccagacggacgtttttgcaccggatttgatttcaatctgcttttcaccgcgcagttcaaccaggccctcttccagacgcttgcgataaatcggatcgtcagagagtttggagttgaacagcatagtgaccaggaaggacatcaccagaaccgccagcagggtggacgggatgaccacggaaagcagatggaggtagctgatgccatgaccttccatcacggaagacatgtaaaccactgccgctgagattggcgatgcggtgatcgcaatctgcgcggataccactgcagtagacagcggacggcaaggtttaacgccttgttccttcgcaacttcagcgataactggcagtgtcgccagagagatgttgccagtaccagcaaagatagtcaggaaataggtcacgatcggtgcgaggatcgtgatgtatttcgggttacggcgcagcagcttttctgtctgatgaaccagatagtccagaccgccagcaacctgcatggcagaaatagcggcgataaccgccatgataatggaaatgacatcgaacgggatgttaccgggtttaacgccaatagcggcaagaaccagcacccccaatccgcctgcaaaaccaatacctattccccccaatctggcgcccaagaagatcgccagcaaaactatgatgagttctacaactagcatattagccttccttgttttttaacaagttgatattaaattgttatttttaagttactgctcacaagaaaaaaggcacgccatctgacgtgccttctttatttgtactaccctgtacgattactgttcgctttcatcagtatagcgttttgctttgtaagccgggtgcatcagattctgtacggagaaaatatcgtcaagttccgcttcagtcaacagaccgcgttccagaacgacttcacgtacactcttaccggtttcggcacagattttacccacgatgtcaccgttgtggtgaccgatgaacgggttcaggtaagtaacgataccgatagagttgtaaacgtaaccttcgcacacttctttgttagcagtgatgccgttaatgcatttttccagcaggttgtagcaagcgttggtcagaatgtgaacggattcgaacatggcctggccaatgactggctccataacgttcaactgcagctgacctgcttctgctgccatggtaacagtggtgtcgttaccgatgactttgaagcatacctggttaaccacttccggaacaaccgggtttactttagctggcatgatggaagagcctgcctgcagttccggcaggttgatctcgttcaggccggcacgtggaccagaagagagcaagcgcaggtcgttacagattttggacatcttcacagccaggcgtttcagcgcgccgtgaaccataacataagcgccgcagtcggaggtcgcttcgatcaggtcttcagccggtacgcatgggaagccagtgacttcagccagttttttcactgccagcggagagtactctttcggcgtgttcagaccagtaccgattgctgttgcgccaaggttaacttccagcagcagttcagcggtacgttggatatttttcacttcttctttcagcaggatgctgaaggcgcggaattcctgaccgagggtcatcggtactgcgtcctgcagctgggtacgacccattttcaggatgtcctggaattcgacagctttacgttcaaagccttcacgcagttggttaatcgcatctaccagtttaatcagggaagagtaaactgcgatacggaaaccggtcgggtaggcgtcgttagtggactgacatttgttaacatggtcgttcgggttcaggtactgatattcacctttctggtgacccatcagttccagaccgatattggccagcacttcgttggtgttcatgtttacggaagtacctgcgccgccctggtagacgtctaccgggaactgatccatgcattttccgttgttcaggacttcatcacatgcggcaatgatggcattcgctacacttttaggaatggtttgcagctctttgtttgccatagctgcggcttttttaaccattaccataccgcgaacaaattcaggaatatcactgattttgttgttgctgatatagaagttttcaatcgctctcagagtgtgaacaccatagtaggcatcagctggaacttccctggtacccaacagatcttcttcgatacgaatgttgtttgacatgtgaaccttctttttcaagctgccaatgatttgctttaaacacacagaatatatgtggtttcgaatgtttttcgaccgacgattatcccctgcatcgaccgaatacccgagatcatatgctgcttgaggatttctaccgtaacctggatcactttaagtgtcggtttttaccccttaattattaatttgtgaaatggatcaccgctttgggattactaccaaaaatagttgcgcaaacatcttgaaattttgctaatgaccacaatataagctaaacgcgattcgcaacccattcaggtagccgggtttaaccggctgctattacaggagaaacctttgcgctggttaccttttattgccattttcctttatgtctatattgagatttcaatctttattcaggttgctcatgtattgggggtattgctgaccctcgtgctggttatattcacgtcagttatcggtatgtcactggtacgtaaccagggctttaagaatttcgtgctgatgcagcaaaaaatggcggcgggtgaaaacccagcggcggagatgattaaaagtgtttcgctgatcattgccggtttgctgcttttattaccgggctttttcaccgatttcctcggtttgcttcttttattaccgccggtgcaaaagcatctgacagtgaagttgatgcctcatctgcgtttttcccgtatgccaggtggcggttttagcgccgggaccggtggcggtaatacttttgatggtgagtaccagcgaaaggatgatgaccgcgaccgccttgatcataaagacgatcgccaggattaatgtcgaaacgccggattatgtggttatgccattttccggcgtttttcgttttggcagaaacagccataaccccgccagcatgatcagcgcgtagagacttttccagccgaccattgccagtaacagaacgcataatagcccgccaaccactgccagtagtcgataacgtccttgcaataatttacagcctgccagcatgcataacagataaatcataataaagatgccattggcataaataataagagcgtccagattgatctctaaagcatgaatcaccaacgtgctcaccacgcagcagccgagcaccgcattgagggcattattcggaatatggcgagaagagaggcgtgccaggtaatggtcaggattatgttgcgcctgcgaccagaccaggcgggcgaagctctgtatataaatgttgagactggcaaagcaggccagatagccaattacgcaggcaatccataacgctcctacaccgaataactgcactacaattttgggaagcgatgctgccgccgccatttgttcaccataggcgtcgaagtgtaagacgactaccgtacagccccaatagactaatcctgccagcagcaggccaatcatcaaagcacgaggaaaatcacgctctggatttttaaattccgaggcaagatgggcaaatgcttccagaccgacaaaacaccagaacatcactgataacgcagcgaataacccggtaagttcgatatttcctggcgcagggaaggggatattcgcaggtttgatatcgcccgcccaccagatagcgacaatcagtgcgacgataagcccggcaataactgtttgtagattagcactggaactggcacctcgagtaccgatataccacaccagcgccagcgtaccgagttctgccaacaacagttgcccgctatgccagccaaacattgcctggccgaatccggcagcaatttgtagcgcggcaggcaaacccacgggaatgaccgataaaaacaaccagccggtgactcgctcaagccgcgaaccaaacgccataccgacgaagtgtgcgacgccgcctgcgctgggatagtggcgacccagaatcgcaaacacaatcgcaatcgggaacactaagataatcaaaacgggccacgcccacaggctgttattgcctgctactagcgcagctaacgcaggaacggcaaacacgccagtgcctaataatgacgtcgatagtaggccgatgccctgggccagccccagttcttgtttgagtccactcatgggttgatgtccgattgcgcccaaattttgggcaactgcgtagattttcgatggtagcacaatcagattcgcttatgacggtgatgaagaaatagcgatgaaatgtgaggtgaatcagggttttcacccgattttgtgctgatcagaattttttttctttttcccccttgaaggggcgaagcctcatccccatttctctggtcaccagccgggaaaccacgtaagctccggcgtcacccataacagatacggactttctcaaaggagagttatcaatgaatattcgtccattgcatgatcgcgtgatcgtcaagcgtaaagaagttgaaactaaatctgctggcggcatcgttctgaccggctctgcagcggctaaatccacccgcggcgaagtgctggctgtcggcaatggccgtatccttgaaaatggcgaagtgaagccgctggatgtgaaagttggcgacatcgttattttcaacgatggctacggtgtgaaatctgagaagatcgacaatgaagaagtgttgatcatgtccgaaagcgacattctggcaattgttgaagcgtaatccgcgcacgacactgaacatacgaatttaaggaataaagataatggcagctaaagacgtaaaattcggtaacgacgctcgtgtgaaaatgctgcgcggcgtaaacgtactggcagatgcagtgaaagttaccctcggtccgaaaggccgtaacgtagttctggataaatctttcggtgcaccgaccatcaccaaagatggtgtttccgttgctcgtgaaatcgaactggaagacaagttcgaaaacatgggtgcgcagatggtgaaagaagttgcctctaaagcgaacgacgctgcaggcgacggtaccaccactgcaaccgtactggctcaggctatcatcactgagggtctgaaagctgttgctgcgggcatgaacccgatggacctgaaacgtggtatcgacaaagcagttaccgctgcagttgaagaactgaaagcgctgtccgtaccgtgctctgactctaaagcgattgctcaggttggtaccatctctgctaactccgacgaaaccgtaggtaaactgatcgctgaagcgatggacaaagtcggtaaagaaggcgttatcaccgttgaagacggtaccggtctgcaggacgaactggacgtggttgaaggtatgcagttcgaccgtggctacctgtctccttacttcatcaacaagccggaaactggcgcagtagaactggaaagcccgttcatcctgttggctgacaagaaaatctccaacatccgcgaaatgctgccggttctggaagctgttgccaaagcaggtaaaccgctgctgatcatcgctgaagatgttgaaggcgaagcactggcaactctggttgttaacaccatgcgtggcatcgtgaaagttgctgcggttaaagctccgggcttcggcgatcgtcgtaaagctatgctgcaggatatcgcaaccctgactggcggtaccgtaatctctgaagagatcggtatggagctggaaaaagcaaccctggaagacctgggtcaggctaaacgtgttgtgatcaacaaagacaccaccaccatcatcgatggcgtgggtgaagaagctgcaatccagggccgtgttgctcagatccgtcagcagattgaagaagcaacttctgactacgaccgtgaaaaactgcaggagcgcgtagcgaaactggcaggcggcgttgcagttatcaaagttggtgctgctaccgaagttgaaatgaaagagaaaaaagcacgcgttgaagacgccctgcacgcgacccgtgctgcggtagaagaaggcgtggttgctggtggtggtgttgcgctgatccgcgtagcgtctaaactggctgacctgcgtggtcagaacgaagaccagaacgtgggtatcaaagttgcactgcgtgcaatggaagctccgctgcgtcagatcgtcctgaactgcggcgaagaaccgtctgttgttgctaacaccgttaaaggcggcgacggcaactacggttacaacgcagcaactgaagaatacggcaacatgatcgatatgggtatcctggatccaaccaaagtaacccgttctgctctgcagtacgcggcttctgtggctggcctgatgatcaccaccgagtgcatggttaccgacctgccgaaaaacgatgcagctgacttaggcgctgctggcggtatgggcggcatgggtggcatgggcggcatgatgtaattgccctgcacctcgcagaaataaacaaacccccgggcagaaatgtctgggggtttttcttttggtcatctttctagtataagattcagacacggacgacgcgagtggcgtccagctcattgattatggggaataacatgcacgtaaaatacttagcagggattgtcggtgccgcgctactgatggcgggttgtagctccagcaacgaattgagtgctgccggtcagagtgtacgcattgtggacgagcaaccaggtgcagagtgccagctgattggtactgcgacaggtaagcaaagcaactggctttccgggcaacacggagaagaaggcggttctatgcgcggcgcagcaaacgatctgcgcaaccaggcggctgcaatgggcggtaacgtgatttatggcatcagcagcccgtcgcagggaatgttgtccagttttgtcccgacggatagccagattatcggtcaggtttataagtgcccgaactgatgtgatccagaggctggatacttccagcctcgtagtaaaacagatgtgattatttcgcctgtggtgcagttttgctggtggattgaacacgtaagtgatgcagcgcgcgtaagcattgatcctgggttagcggttgggcgttatttgccgctacggtgcgaacatagacctgacatggcacacccgcgagttttttcagtcgggggctgaaatcaagcattcggcgagtgatcgcctccacttctttacccggcgttgcttcacgcgttttcaccactgcgccgctaaattgttcattgccactttcatctttaaagcggtaaagcaccgccagataatggttgaacaagttatgtttccattccggttgggaataggtgtcatattccagattgccattttcctggcagtcaacgtcgtataacggcaggaaatctaacagtgaggtaatacgtaatgccagttcacgcatttccgcattattaattgcatgaatgattgctcgcgccagcatttcaatctgcaactcattgacgactaactcacatttgctaccgtcatgtagcgttaatacgaaggtaagattttcgccctgatcatcggtaagttccagcgtgttaacccgacgattaatatcggcatttttaagctcatcaaccagaatttctgggatattttctgccattttcttaatgactttatcgcgagcttgttcatactgaaggcgtgcagcagcatccagtttatgcttttgatgcagacgactttccagcgcaatcagaaggtcgcgcaattccatggcagacataaagaacaacgattctttattgcgaggttctttaattttcagcgccagtgcaatgaaattattactcttgcgaataacaccggtattaacacccttgatgcttatggccatgtaggttctccctaaccatttctcaattaaataattaattttagtttataagccagataaatgggcttggtagtaatagttgttaaaataacataaatagccgtgctcactctatataaacagaaaagaaaggttaattattggtgttggttatataaagagtaacaacagcaatgtatatgaataattaaaggttatgcaacgggcaaagattaaacttccctgtttaatcagttactgctggcgtagctggagatccagcggcgttttgctgggttcgccgccaatttctcgcgccagtttaggcaccagatatcccgacaccaatgtcagcaactcacgcataatctgccgtgcttcgtcatcactcaccataaaatgcgccgcgccctgtactttatcgagcacatgcaggtaatacggcatcacgcccgcatcgaacaacgcattactcaggtttgccagcgtttgcgcgttatcgttcacaccacgtaacagaacgctctggttcagcaaagtaacgcccacccggcgcaacttagccatcgcctgacggaatgtttcatctacctcattggcatggttgatgtgattcaccagcaagatttgcagcgtagaatgtgaaaagcgttcaaccagcgcatctgtgatgcgtgccgggatcacaatcggcagacgactgtgaatccgcagacgtttgatatgcgggatggcttccagttgtgtgagcaaccagtccagctcgtgatctttcgccatcagcggatcgccgccggagaaaatcatctcgtccagttccggatgcgcagcaacatactcaagtgcagtctgccagttacgcttgttgccctgattttcggcataggggaagtggcgacggaagcaataacggcaatttaccgcgcagccgcctttgaccagcaaaagcgcccggttgtggtatttatgcaacaaaccaggcactacgctgtgctgttcttccagtgggtcggtggagaatccgggggcgacgacaaactcatcttgcgaggtaagtacctgacgcaaaagaggatcgtccggattgcctttctccattcgatcgataaatgagcggggcacacgcagggcaaacagctttttggcgctgcgtccggccaacagtttttcctccgcgtctatattcaaaagacgcagaagttcatcaggatcggtcacaacatcggcaagttgcgttaaccaatcttctctggatggggtatttagggttacaatatgcgccattttgtggcttagctaccaattaacaaatttcagagggccttatggcaacgtactatagcaacgattttcgtgctggtcttaaaatcatgttagacggcgaaccttacgcggttgaagcgagtgaattcgtaaaaccgggtaaaggccaggcatttgctcgcgttaaactgcgtcgtctgctgaccggtactcgcgtagaaaaaaccttcaaatctactgattccgctgaaggcgctgatgttgtcgatatgaacctgacttacctgtacaacgacggtgagttctggcacttcatgaacaacgaaactttcgagcagctgtctgctgatgcaaaagcaattggcgataacgctaaatggctgctggatcaggcagagtgtatcgtaactctgtggaatggtcagccgatctccgttactccgccgaacttcgttgaactggaaatcgttgataccgatccgggcctgaaaggtgataccgcaggtactggcggcaaaccggctaccctgtctactggtgctgtggttaaagttccgctgttcgtacaaatcggcgaagtcatcaaagtggatacccgctctggtgaatacgtctctcgcgtgaagtaatgcggttgtggtgcggcctgcaggctgcaccatcacttattcaggtcagagatgatgaaacgccttatcgttcttgttttgcttgccagcacgctgctcacgggctgtaacaccgctcgcggtttcggcgaagacatcaaacatctcggcaactccatctcccgcgctgccagctaatttttcttctcttccgaaaaatcatcagatttccgtcatttttggcgatgttgtctattattaatttgctataggcaaacataaataacattacctaaaaggaagacgttatggtgaagaagacaattgcagcgatcttttctgttctggtgctttcaacagtattaactgcctgcaacaccacgcgtggcgttggtgaagacatttctgatggcggtaacgcgatttctggcgcagcaacgaaagcgcaacaataagcaataacggtacgacagctgtgtcgtgccgtttgttttttctgtgatagtcataaaggtaatagttgaaattcccctgccacctggcaaaatatccgttcaaccatcagctttgcaggacgacctgcaaacgcgtcttttcaccggggacggccccaattttccggagcctgatatgtcctggattatcttagttattgctggtctgctggaagtggtatgggccgttggcctgaaatatactcacggctttagtcgtttgacgccaagtgttattaccgtgacggcgatgattgtcagtctggcgctacttgcctgggcgatgaaatcgttaccagtagggacggcttatgccgtgtggacgggtattggcgcagtcggcgcggccatcaccggcattgtgctgctcggtgagtccgctaacccgatgcgcctggcgagtctggcgttaatcgtattggggattattggtctgaaactcagcactcattaactaccgggctgctgtacccaaataaacttactgacatcaaacccttcccgggtcgcgactgccagcatctcctgtttcacttcgtcagaaatggttggcgtgcgggagagtatccacaggtagtcgcggtccgggccgcaaaccagcgcatggcggtattcccgatcgagtgcaataacgttataaccgccatagaaaggaccaaagaatgacactttcagcgcagcgcgagttggtgcgccggtaaagtacgctttcccttcactctgctgccacatttctctgtcagggttatagcctttattaatgacattcaggccgccgtcatcacgcaggctgtatgttgcggtgactttttccagtccacgttcaaagcggtgatcaaaacgggcaatctcataccaggtaccgagataacgtttagcgtcgaaattattcactacggtcacgccacgcggcggcgtaggggaactgcaggcaacgaccagaaatgcagctgtcgctgcggcaacgagagggagcaggcgcataaatgtttccttactggtttttttctaagtgtagatgacagcaaggaaaagcggagaaaaggtccgaaaattcggacccgatgaaattttactgtagagcgttgagaatctgccaggcggcggcgactctcgctggattggggtagtttttgttagccagcatcacgatacccagctctttttctggaataaacgcgacatagctaccaaatccgccggtcgcccccgttttatgtacccatgatgcgcgtactgcaggagttgggggcgtaatcggttttacggggcgtgctgccagtgcaattttattgtcactgccgttaatgatgatgtcaggatttaccggccagtccagcatttcccagcccagaccctgatacatatcgccggtttgccagtagcgagattgtgccagttgtatcccttgttgaagtgttttctcattgatatcaaggggttttaaattgctttgcacccagcgggccatatcttcaatggtcgacttcacaccataagcttcagcatctaacgcccctggcgaaacatgtactgccttaccttcgcgatatccccaggcgtagttcttttcttctgcggacggtacattaatccacgtatgattgagtttgagtggctggaagacacgagttttcatcgcctgctcaaaactcaaaccagacggcttcacagccagtgcgccgaacaaaccgatactggagttggcatacagacgttgtgttcctggagcccatgcaggctgccagttttgatagaagcgcagcaagtcgcttgaggatttcacctcatccggcacctgcaatggcaggccgccagcggtgtaggttgcgagatgtaatagtgtgatcccattccactgtttagcggtaagttcaggccagtattttgttgtgggatcgcttaacttgatttcccctcgagcaatagcgtcgccaccaagcacgcccgtaaatgttttgctgaccgaacctaactcaaacaacgtttgctgtgtgacgggctgctttttggcgatgtccgcatagccccaggtaaagtaataaggtttaccctgataaattaccgctaccgccataccggggatcttttgttgctctataagcggggtaattgtgcgatgcacaatatcgttgatttgttgaggggcggcaaatgtggagcaagaggcggtaattaataaggtgcagagcgtcgttttgaacatagggtctggtttccatacaaaacggcccgccataggcgggccggatttacattggcgatgcgttagattgtaacgacaccaatcagcgtgacaactgtcaggatagcagccagaccgtagaaaacccatttacccgcaggtacgtggattttcagatcgtgcatcgcgtggtgcatacggtgtaaaccacaccacagcggcagaacgatcatcaggaacaggaatacgcgaccaatgaagctctgcgcgaacgccagaacgcgctcgtagctcagtgcatcacccggaaacagccctagcggcagcagaataccaaccagcaggatcatcaccggcgcaatgatggcgctccacataccaccggccccgaagaggccccagaataccggttcgtcagaacgctttggatttggattaatcatctcaggctccttaccagtacagggcaacaaacaggattacgatggtggcaaccacagttaccgcccagagacttttgataattggctctggtcccattttttcgtcttttacaatgatattggctgcttttggtgccagctcaaaccaggttttggtgtgcagcagggctgccgccagagtgatcaggttaatgatcacgataaccgggttttgtaaaaagtcgacgaatcccgcccaggcttccgggccatttttcagggcaaacagcccgaaaatcagttcaatgctgaaccacacagccggaaccgccgtgccttcgcgcagcatgtaaaagcgataaaacggcaattttttccaccaggtggacgtcattggccgtacatacggtttacgtttagtcgtcatgttgcactccttagcgtggtttcagggtcgcgataagaaagtctttcgaactttctactttgccctgctgaatggccgcagccggatcgacgtgtttcgggcagacttcggagcagtagcccacgaaagtacagctccatacgccgttctggctgttcaactgcgccatacgctccttcttaccgtggtcgcggctatcttcgttataacgatgcgccagcgtaatggcagccggaccgatgaactctgggttcaggccaaactgcgggcacgcggcgtagcacagaccacagttgatgcaaccggagaactggtgatacttcgccatctgcgccggggtctggatgttagtaccctgatccgcggtgcgggagttgccgatgatgtacggtttgatcgcttccagactttcgatgaagtgagtcatatcgaccaccagatcgcgttcaatcgggaagttagctaacgcttcaaccttcataccgtcggtgtaatcacgcaggaaggttttacatgccagttttggcacgttgttaaccatcatgccgcaggagccacaaatcgccatacggcaggaccagcggtagctcaggtccggtgccaggttgtctttgatgtagcccagcgcatccagtaatgaggtagttgcgtcataaggcacttcatagaatgcgctatgcggtgcggtatcgacttccgggttatagcgcaccacctcaattttcaggtttttcatctcagccattcgccttctccttcttattggctgcttccgccttatcggctgcatccgcttcgccaccgtaaacacgtttagctggcggcagcgtagtaatcttcacgtcgctgtactccaggcgagtcgtgccatcagcatcgcggaaggcgagggtgtgtttgaggaagttgacgtcgtcacgctcggtgcaaccttcgtccagacgctggtgcgcgccgcgggactctttacgtgccattgcggagtgcgccatacattcagcaacgttcagaccgtggcccagctcaatggtgtagagcaggtcggtgttgaacacgctggaagtgtcggtgatgcgcacgcgcttgaagcgttcctgcagctctgccagcttgtcgatggttttctgcatcagttccggcgtacggtagataccgcaaccttcttccattgccatgcccatttcgtcgcggatcttagcccagttttcgccgccatcctggttaaccagatctttcagacgttgttcaacgccagctgcctgcgcttcaattgccgcttcgttgccattaccggcagttgctgcacgctctgtcgcttgttcaccggccagacgaccgaagaccaccagttccgccagcgagttggagcccagacggttcgcaccgtgcagaccaacagaggaacattcacccacggcgaacagacctttaatgcgggtttcacagttctgatcggtttcgataccgcccatggtgtagtgtgcggtcggacgtaccggaatcggttctttaaccggatcgacgccaacgtacgctttcgccagttcgcagatgaacggcagacgttcatgcagttttttctcgccgaggtgacgcaggtcgaggtaaaccacatcgccacgtggcgtggagatggtgttgcctttacgccattcgtgccagaaggcctgagaaactttgtcgcgtggacccagttccatatatttgtttttcggctcgcccagcggagtttccgggcccatgccgtaatcttgcagataacggtagccatttttgttgaccagaataccaccttcaccgcggcagccttcggtcatcaggataccggaacctggtagaccggttgggtgatactgaacgaattccatgtcacgcagcggaacgccgtggcttagcgccatacccataccgtcaccggtaacgatgccgccgttggtgttgtaacgataaacgcgacccgcaccgccggtagccataacgaccgcgttagcacggatctgcaccagcgtgccttccatcatgttcattgctaccaggccgcgaacatgaccatcatcaaccagaatatccagcacgaaatgttcgtcaaaacgctggatctgcgggaattgcagagaggtctggaacagcgtgtgcagcatatggaagccggtcttatcggcggcgaaccaggtgcgctcgattttcatgccgccgaagcgacgtacgttgacgctaccatccgggcgacggctccatgggcacccccacagttccagttgggtcatttcggttgggcagtggtggacgaaataatccacgacatcctgctcacacaaccagtcgccacccgctactgtatcgtgaaagtgatattcgaagctgtcatgatcctgcgcgacagcggcggagcccccttctgcagcaacggtatggctacgcatcgggtatacttttgagattagtgcgatttttgcatttggatttgcctgcgcggcagcaattgcagcacgtaatcccgcgccaccggcgcctacaatggcaagatcggcttgaaaggtttgcacgacattcctccagattgtttttatcccacagccccgtacttcagggtaagtgcctgaaagttacggtctgcgaacgctattccactgctcctttataggtacaacagtatagtctgatggataagtctgaaatttgacgagatcgatttttttagtgcgcaagagggctaaattatcactgaagatgattaatttaattactaaaccatcagatcgtgctttttttagtcactgcccaccgttgtgttattcctgcgtaaaatttgtctcgccgtcgcgttgcgagtagacttcgtgcccttgtcaaaaactggagatttaactatgagcgaaacggcatcctggcagccgagcgcatccattcctaacttattaaaacgcgcggcgattatggcggagatccgtcgtttctttgccgatcgtggagtgctggaggtggagacgccttgtatgagccaggcgacggtaaccgatattcatttggtcccgtttgagacacgtttcgttggccccgggcattcgcaggggatgaatctctggttaatgaccagcccggaataccatatgaagcgcctgctggttgccggttgtgggccggtattccagctgtgccgcagcttccgtaatgaagagatggggcgttatcacaaccctgagttcactatgcttgagtggtatcgaccgcactatgatatgtaccggttgatgaacgaggtggacgatctcttgcaacaggtgctggactgtccggcagcagaaagcctttcttatcaacaagctttcttacgttatctggaaattgacccactctctgccgacaaaacgcaactgcgggaagtggcagcgaaactggatttgagcaacgttgccgatactgaagaagaccgcgacacgcttctacaattgctgtttacctttggcgtagagccaaatattggcaaagaaaaaccgacctttgtgtaccactttccagccagccaggcatcactggcgcaaatcagtaccgaagatcatcgggtcgctgaacgctttgaggtttattataaaggtattgagctggcgaatggtttccatgaattgacggatgcccgtgagcagcaacaacgctttgaacaagataaccgtaagcgcgcggcgcgcggtttgccgcagcaccccattgaccagaatctgattgaagccttgaaagtcggtatgcctgactgttccggcgtggcattaggtgttgatcgtctggtgatgttggcgctgggcgcggagacactggctgaagtcatcgcctttagcgttgaccgggcataattctgaaaaattactgaattaacagcgaagaatggcgtgataagcgccattctgtagcatatgttttcatttttccgctaaaggccacaatttaagactggatatttgatatcatccaggtatcaattctgtattggtttttacgctgcccgctcaatgttgggcagtgcagttcagtgggcgcgttttatacacgcgctgaaatgaaggatggtttcatgcctcactcgataaaaaagatgagtctgataggactcatattgatgatctttacttctgtatttggatttgccaatagcccatcggcttattacttaatgggttatagtgcgattcccttttatatattttctgcattgttattctttattccattcgccttaatgatggctgaaatgggagctgcttatcgcaaagaagaaggcggtatctattcctggatgaataatagtgtcggaccacgttttgccttcattggtacgtttatgtggttttcctcttatatcatctggatggtgagtacctccgcgaaagtttgggtaccgttctcaacattcctctacggtagcgacatgacccagcactggcatattgccggactggagcctacgcaggtggttggtctgctggcagtggcatggatgattctggtcaccgtcgttgcttcaaaagggattaataaaattgcccgcattactgcggtgggcggtattgcagtaatgtgtctgaatttagtattgctgttagtaagcattactattttgttattaaatggtgggcatttcgcgcaggatattaatttccttgcatcaccgaacccaggttatcagtccggtctggcaatgctatcgtttgtggtatttgccatttttgcctatggcggaattgaagcggttggtggtctggttgataaaacggaaaatccagaaaagaactttgccaaaggtattgtttttgccgctattgttatttcaatcggttattcgctggcaatatttttatggggcgtcagcacaaactggcagcaggtattaagtaatggttccgttaacctcggcaatattacctatgtgctgatgaagagcctcggggtgacgctgggtaacgcactgcatttttcacctgaagcgtcattgtcgctgggcgtatggtttgcgcgtattaccggactttcgatgttcctcgcttataccggggcgttctttacgctttgctattcaccgctgaaagccatcatccaggggacgccgaaagcattgtggccggaaccgatgacgcgcctgaatgcgatggggatgccgtctatcgccatgtggatgcagtgtgggttggttactgtcttcatcctgctggtttcgtttggtggcggtaccgcatcggcgttctttaacaagctgacgctgatggcgaacgtgtctatgacgcttccttacctgttcctcgcgctggctttcccgttctttaaagcacgtcaggatctcgacagaccgtttgtgattttcaaaacgcatttgtcggcaatgattgcgacggtggttgtcgtactggtggtgacatttgcgaacgtcttcaccatcattcaacctgtggttgaagctggagactgggacagctcattgtggatgattggcggccctgtcttcttctcgctgttagcgatggcgatttaccagaactattgcagtcgcatggcgaacaaacctgagttagctctcgactgatcatatgaaatcctgcaactcatcgtctctccggcgatgagttgtcaggaagtaatgcgtatggatgatactctccggggccagtgataactgaagatgatgttaagctgctaaatgagccacgttgacatcatttggcagcttcatgcattacaaacttcccgcctgacgacctttgcccgcagaagttaatgttctccccgtttgtttaccattcaggctttccagacgcatctggaagggcgggaatggcatatcgataccgtgggcgtggaagcccgccagaattagttggtggatctcatggcgtagcggcatacggtgacccatctcagcggcgtaaatacgcagctcgaaaatttgaatcccctgttgcagatccaccaggaagacttccggcgccgggttgtcgatcaccagcgagcagcgacgcgctgcggtgagcaggatttccgtcacttcttcactgttagcatcggcaggggccggaatcgtcaataccacgcgcgtgaccgagtcagagagcgaccagttgataaactgctcggtaataaacgccttgttcggcacgattatctctttacggtcccagtcgctgatggtggtggcgcgggtgttaatttttgtcacgctaccggtgagatcgcggatcgttaccgtatcgccaatacgaatcggtttttcgaacaggataatcaggccagagataaagttggcgaaaatctcctgtaaaccaaagcccagaccaacaccgagcgcggcgaccagccactgcaatttcgaccactcaataccaatcatcgagaagccgaccagcccgccaatcagcatcagcagatatttggtgatggtggtgatggcgtagcccgtacccggcgttaaatccaggtgctgcagaatcgccagttccagcagcgcgggcaggttgcgcaccagctgcgtggtgatgataaacaccagaatggcaatcagtaccgcaccgagggtaatcggctccaggctttctacgccctgtaccgtggaagtgacatcccacagcgaaatattttcgaggaagccgaaagcggaatggatttctgaccacagcacaatgaccgaaagcagggcgatcaacatcaaaattgagcgcaccagccgcaaggattgcgcactgatggcatcgagatcgacttcgctttcatcgacttcaattgctccttccgggctactgtgatgatgcgcttcctcttcgccacgcgcacgctgcgctaacatctctgcccggcgatgcttcgcccggtcaaacgccagcctgcggcgctggatcagcatccagcggcggataacgtgataaaccaccagtagcaggaaccagatggcaaccgaggtttcaagcctcgctaacagtgcctgcgccgttgccagataacccaccgccgacgccagaatggcaaccagcggtgcgccaatcatcatgttccacagcatatggttggtaatgttgtcgccgctgccttctttgttgagatacagcgggatcccggcctttttcaggctgagggtgaccaccgccagcgcaccgcaaatgaggataaagcaaagccgtcccagcgaaccggaaaattcgcggtcgtcgaggttatcgaacatcatcagcgccataatcagcggcacaatgagcccgatgctcatcaggtagtaacgcatcccacgggaaactcgttcgcgcggccagccaaaatgagcgataaacaagccgttcgggcgagcaaaggtggcgcaaatcatcactacccacagcagcggcacggtggctgttacgccatcaccaatcgcgaccgccagcggataaggccacgcctcgcgcaagccgtaacccagcgtcatccacagcacaggcagcggtgacgcgacgagaatcgaccagaaaagagtgcgtaacgtcagccagaagtgatcctgagtcactttgccgactttcgccgccgaacgttcaagaaaacgggtgaaatagcggcgcgagtaaatactgcaaccgaccagaatcaacgcgccaaacagcggcaaaatcgtctctttactggtcagcatcatcacactggctttgcccaactgactgaaggtgtccagcgaaatgagacgacgcagatcctgggcgatttccagcggccaggcgatggtcatcgggcgcacgtcagaggtccagaacagatagcggtgcgtcgcttcgttcacctctttcagcgcatcctccagttgcccgttggagactttcagcttggtcagctccagcagtagcgtgtcgccaccctgcaacaatgagttcagcaactcacgctgagtgcgtagctgtgcttccagaatacggttttgctcagcggtcagtggctgaccgtcggcctgatggatttgccgtagcagcggctgtttattaagcagatcctcataacgtaaccgttgcacacgtaactgcgccatttcggtatcaagctgttgtggttttggcatttccggtagccgtgccacctgcgcccgcaacgcttcgccgagcaggttagatgatcccagccattgcgactgttcacgcagcgtattcaacgcctgccggacctgtaacgtctggctggcagcctgacgctgttgcgaggcaacgagatccatccgctgcgcctgttgattcagcgccgccgatagttcgcggttaattttaaactgggcgacgatatcttttggcaaatcggcgctactttccgccagttgctcggtactttccagcgcccgttccgcttccagttggcgttgactattcaactggttgcgtagtgcttgcaaatatgcatccagctgctggctctctttttccgccagctcagagcgcaagcgcgctaattcctggcggttattggcagatagctgcgccagctccagttcatcaacgagcgctttcagacgtgcggagtcagactgcaacgcgaaattttgtgcctgattgagcggggtattgccggtaagcgtccccaggcggcgctcgatttcattcaactgacggcgggcatcggtttgctgttgcggcagttgattcagcgaatcggcaatctcgcgggcgcgctcctgctcttgctgggcctgacggcttttatccagcaactgactgctgatctggagaatttcctgattcagcgcatcgttagacattcccggcgacacgctgcgtggctcgtcacgcatgttgtttaactgcgcgcgcagagtggcggaaattttcggataattatcaatgacttcttgatattgcttgatgcgctcaagggaaccttttcgttcctcaagcgcatttaaggcagactggagcgcctctacgacttccggctgcgcgggtttcgccgcttttgcctgctccagttcctgggtgatttgtttgctatcgggggccgtcgcggcgtacgccccccaactgaggcaccaggccatcagaaaagtgataatcaggcgcacgtcagcgtttcctttgatggattagacctggtcttttttgtcgtcaaccaatgggctggcgtcgtgttctgcttcgatctcttcagcaggaagcggggctggttcagcgtctggcgtaacaaaggtttcggtagatactgccagcggctggccaattttcgtgacagacaggctttccagttgctcaaccaggttcactttacctggtgcaaacaggttgataacggtagagccaagtttaaagcgacccatttcctggcctttcagcaatgccacagaaccgtcgttttccccggcaggccaggtccagcgcttgatgatgccttcgcgcggcggcgtaatggtgcccgcccagaccgtctcaatgctgcctacaatcgtcgcaccgaccagaatctgcgccatcgggccaaattcggtatcgaacaggcagatcacgcgttcgttacgggcaaacagattcggcacgttctgagccgtgagatggttaacggagaagagatcgcccggcacgtagatcatttcacgcagaataccgttgcacggcatgtgtacgcggtggtagtcacgtggggagaggtaagtggtcacaaacgtaccgttacggaagagatccgccatcagatagttgcctgccagcagggcttcgaggctgtagttgtggcctttggcttgcaggattttatcttcttcgattttacccaactggctgataacgccatcggcaggcataaccagtacattcggatcggtatcgattgggcgtacttcgtcacgcagcggacggacaaagaattcgttaaaggtgcggtagctggcggtgtccggcttttgcgcctctttcatgtcgaccttgtagtatttaacgaacagatcgataaccagttttgtcagccatcctgcccgcttgcttgcgccccaacccgccaggcgagtaagccatagtttcggcagaatgtactgtagcgaaagtttaaatgaatttaacaaggtagcctccaggccattgttttgtcgttcctgatccggcctacatgccggatcctgaaaaaaaggggacgattctaacgacggttagcttaattgtcagtcatccgtatcagaaaagtttttacgcgtttttacctgcgccatgctttccagaatacggtgatagttttcgaaacgggtttccgcgatttttccttcctcaaccgcttcccggatagcgcagcccggatcggtatcgtgtttgcaatcgcgatatttacacagacctaaatagtcatggaattcgacaaagccctgagtgatttgttccggctccaggtgccagagaccaaactcacgcacacctggggaatcaatcacatcaccgccgtgcgggaagtgatacagtcgtgcggcggtcgtggtgtgctgaccaagccccgagttgtcagagacatcgttggtcaggatctctttttgcagccccagcaacgcgttcagcaggctggatttgccaacgccagactgcccggcaaaaatgctgatgcgcccggtcaacgcctcttccagcggtttcagcccatcctgagtatgactggaaaccatcaatacgcgataaccgatattgcggtagatatccatctgctcgttgacgaactccatgccttcgtcgtccagcaggtctatcttgttgagcacaataatcggctcaatctgcaaggtttcgcaggccaccaggtaacggtcgataatattgagcgacagctccggcaaaatggcggagacaatgacaatctggtcgatgttggcagcaataggtttcacaccgtcgtaaaaatccgggcgcgtcaacactgaggtgcgctcatgcaccgcttccacgatccctttgacatttacgccttccgccgctggtttacccggacgccagactacgcggtcgccggtcaccaacgaacggatggtacggcgaatattgcagcggtgaacgtcgccatcggcggattccacatcagcgtgcataccaaagcggctgatgacgataccttcatcaggctcgccaaacagattgtcgtcgtagtcgggcttctccttagacgttttaagacgacgctggtgattggcgttcacgcggcgctgctggcctttggagagtttatttttactcaatcgtacagactcctggtcgcccctgatgggcaaaacatctatgatacacgcaattgtggatcaatatagtcactgtgaatgggtggaaaatagcatgagtgccaatgaaaacaacctgatttggatcgatcttgagatgaccggtctggatcccgagcgcgatcgcattattgagattgccacgctggtgaccgatgccaacctgaatattctggcagaagggccgaccattgcagtacatcagtccgatgaacatctggcgctgatggatgactggaacgtgcgcacccataccgccagcgggctggtagagcgtgtgaaagcgagcacgatgggcgatcgtgaagctgaactggcaacgctcgaattcttaaaacagtgggtgcctgcgggaaaatcgccgatttgtggtaacagcatcggtcaggaccgtcgcttcctgtttaaatacatgccggagctggaagcctacttccactaccgctatctcgatgttagcaccctgaaagagctggcgcgccgctggaagccggaaattcttgacggctttaccaagcaggggacgcatcaggcgatggatgatatccgtgaatcggtggcggagttggcttactaccgcgagcattttatcaagctgtaaaatttttcctggtcacgtaagcgccggaatccacttgcggcggcgtgattttgacgctaaattgaacgtcttgctgataatttcagcacttgagataaaaactcaaaaaaaattttttaggggggttgcagagggaaagatttctcgtataatgcgcctcccgtaacgacgcagaaatgcgaaaattacgaaagcaaaattaagtagtacgcgggaatagctcagttggtagagcacgaccttgccaaggtcggggtcgcgagttcgagtctcgtttcccgctccaaaatttgaaaagtgctgtaaagcacagaccacccaagcgggaatagctcagttggtagagcacgaccttgccaaggtcggggtcgcgagttcgagtctcgtttcccgctccaaaatttgaaagtgctgtaaagcacagaccacccaagcgggaatagctcagttggtagagcacgaccttgccaaggtcggggtcgcgagttcgagtctcgtttcccgctccaaattcttctctcaataaaatatccacagcgacgcgatgcgttattgctggtttttgatgtctctgacagactcttgtaaacagagttatccacagcctcaggccgtaatcttaatttcaaagaaacttcgcacggtgaatagtatttttttaacctattgatagataagttaaaaattaagatttcgttttgtcgtatcgatcacttgacgattttttccggcttgaattgcaatgcgtttttatttttattcacaagctgtggatgaatcaggcgtcacgcggtaaccctttttcaatcacccgaaccagacgctgttttttcggtaattgcacttcgaccacgcacgcatttcgcctctcgatttgctgcgcaatcgcccacgctatgtgctcatcaagaagtgggtgctcacctttacgactttccagcgctgtcaaaatcgtttcatcccagggggcattgcctaatgctacggcgatattacgcagccaacgcaggtgacctatacggcgaatcgccgaaccttccgtgacttttaaaaacttctcttcactccaggcgaataactcaatgagttccggtgcgtgtagcggcttacgcgggctgaaatcgtcttctgtagtgagttgcgaatagcgattccacgggcagataagctggcagtcatcgcaaccgtaaatacggtttcccattaacggtcgcaactcttccgggatcgccccttccagttcgatggtgagataagagatacagcggcgagcatcgacggtatatggctcgacgatggctccggtcgggcaaatcgtcatacaggccacgcatttaccgcatccttcctcgactggttgatccacaggcagcggaatatcgaccagcaattcgcctaaaaagaagaacgaaccggcctcgcgattgaggataagtgagtgcttacctgtccagccaagacctgctttttcagctaacgggcgctcgagaataggcgcagaatcgacaaacggtctaaaattcagcgaaacacaatgttgctgaatcatctcgcccagctttttgagtcggttgcgcagaagcttgtgatagtcacggcccagcgcataacggctaacatagccgagtttgggatttttcagcgtgctggcaaatgcggcgttagcaggaaggtaattcatccgcacgctgatcacgcgcagcgtaccgggcaataattcgtgaggacgagcacgcagcataccgtgacgcgccatccagtccatttcgccgtggtattgtttgtccagccatgcttgcagtttgggctcggacgcgctgagatcggtatcggtaatacctacctgctgaaagcccagttccagcccccactgtttaattttttgcgctaactgattgagatcgaggggctctgacatgacggaccatacaatgaagaaaaaccccgtaagtataccacacacagtctggtacgccgacgatatccgccgcggagaacgcgaggcggcagatgcgctggggctcacactctatgagctgatgcttcgtgctggcgaagccgcattccaggtgtgtcgttcggcttatcctgacgcccgccactggctggtgctgtgcggtcatggtaataacggcggcgatggctacgtggtcgcgcggctggccaaagcgatcggtattgatgtcacgctgctggcccaggaaagtgacaaaccgttgccggaagaggccgcgctggcacgcgaagcatggttaaacgcgggaggcgagatccatgcttcgaatattgtctggcccgaatcggtagatctgattgttgatgcgctgctcggcaccggcttgcagcaagcgccccgcgaatccattagccagttaatcgaccacgctaatactcaccctgcgccgattgtggcggttgatatcccttccggccttctggctgaaaccggcgctacgccaggcgcggtaatcaacgccgatcacaccatcacttttattgcgctgaaaccaggcttgctcactggaaaagcgcgggatgttaccggacaactgcattttgactcactggggctggatagctggctggcaggtcaggagacgaaaattcagcggttttcggcagaacaactttctcagtggctgataccgcgtcgcccgacttcgcataaaggcgatcacgggcggctggtgattattggtggcgatcacggcacggcgggggctattcgtatgacgggggaagcggcgctgcgtgctggtgctggtttagtccgagtactgacccgcagtgagaacattgcgccgctgctgactgcacgaccggaattgatggtgcatgaactgactatggactctcttaccgaaagcctggaatgggccgatgtggtggtgattggtcccggtctgggccagcaagagtgggggaaaaaagccctgcaaaaagttgagaattttcgcaaaccgatgttgtgggatgccgatgcattgaacctgctggcaatcaatcccgataagcgtcacaatcgcgtgatcacgccgcatcctggcgaggccgcacggttgttaggctgttccgtcgctgaaattgaaagtgaccgcttacattgcacccaacgtctggtacaacgttatggcggcgtagcggtgctgaaaggtgccggaaccgtggtcgccgcccatcctgacgctttaggcattattgatgccggaaatgcaggcatggcgagcggcggcatgggcgatgtgctctctggtattattggcgcattgcttgggcaaaaaatgagcccttatgatgcagcctgtgcgggctgtgtcgcgcacggtgcggcagctgacgtactggcggcgcgttttggaacgcgcgggatgctggcaaccgatctcttttccacgctacagcgtattgttaacccggaagtgactgataaaaaccatgatgaatcgagtaattccgctccctgatgagcaggcaacattagacctgggcgagcgggtagcgaaagcctgcgatggcgcaaccgtaatctatctgtatggcgatttaggtgcaggtaaaaccacctttagccggggctttttacaggctctgggtcatcagggtaatgtcaaaagccccacttatacgctggtcgaaccctatacgctcgacaatttactggtttatcactttgatttgtaccgccttgccgatcccgaggagctggagtttatggggatccgcgattattttgccaacgatgccatctgcctggtggagtggccacaacaaggtacaggtgttcttcctgacccggatgtcgaaatacacattgattatcaggcacaaggccgtgaggcgcgcgtgagtgcggtttcctctgcgggtgaattgttgctggcgcgtttagccggttaacctttgaaaggtggcgggatgatgtatcgcatcagaaattggttggtagcgacgttgctgctgctgtgcgcgccggtgggtgccgcgacgctctctgatattcaggtttctaacggtaatcaacaggcacggataacgttgagttttattggcgatcctgattatgcgtttagccatcaaagcaaacgcaccgtggcgctcgatatcaaacaaacgggggtaattcaggggctgccgttgttgtttagcggcaataatctggtgaaggcgattcgctctggaacgcctaaagatgcacaaacgctacggctggtggtcgatctcaccgaaaacggtaaaaccgaagcggtgaagcggcagaatggcagctattacactgttgtctttacgattaacgccgatgcgccgccatcgcctccgccaatggttgcgaaacgcgttgaaacgcctgcggttgtcgcaccgcgcgtcagcgaaccggcgcgcaatccgtttaaaacggaaagtaaccgcactacgggtgttatcagcagtaatacggtaacgcgtccggcagcgcgcgcgacggctaacacaggcgataaaattatcatcgctattgatgccggacacggcggtcaggaccctggcgctatcggccctggtggtacacgggagaaaaatgtcaccatcgccattgcgcgtaaattacgtaccttgctcaataacgatccgatgtttaagggcgttttaacccgtgacggggattattttatctcggtgatggggcgcagtgatgtggcacgtaagcaaaacgccaatttccttgtgtcgattcatgccgatgccgcaccaaaccgtagtgccaccggtgcctctgtatgggtgctctctaaccgtcgcgccaacagcgaaatggcaagctggctggagcagcacgagaaacagtcggagctactgggcggagcgggcgatgtgctggcgaacagtcagtctgacccctatttaagccaggcggtgctggatttacagttcggtcattcccagcgggtagggtatgatgtagcgaccagtatgatcaatcagttgcaacgcattggcgaaatacataaacgccgaccagaacacgcgagtctcggcgttctgcgttcgccggatattccgtcagtactggtcgaaaccggttttatcagtaacaacagcgaagaacgtttgctggcgagcgacgattaccaacaacagctggcagaagccatttacaaaggcctgcgcaattacttccttgcgcatccgatgcaatctgcgccgcagggtgcaacggcacaaacggccagtacggtgacgacgccagatcgcacgctgccaaactaaggacgattgatgccaattcaggtcttaccgccacaactggcgaaccagattgccgcaggtgaggtggtcgagcgacctgcgtcggtagtcaaagaactggtggaaaacagcctcgatgcaggtgcgacgcgtatcgatattgatatcgaacgcggtggggcgaaacttattcgcattcgtgataacggctgcggtatcaaaaaagacgagctggcgctggcgctggcgcgtcatgccaccagtaaaatcgcctctctggacgatctcgaagccattatcagtctgggctttcgcggtgaggcgctggcgagtatcagttcggtttcccgcctgacgctcacttcacgcaccgcagaacaacaggaagcctggcaggcctatgccgaagggcgcgatatggacgtgacggttaaaccggcggcgcatccggtgggaacgacgctggaggtgctggatctgttctacaacaccccggcgcggcgcaaattcctgcgcaccgagaaaaccgaatttaaccatatcgatgaaattattcgccgcattgcgctggcgcgtttcgacgtcacgatcaacctgtcgcataacggtaaaattgtgcgtcagtaccgtgcagtgccggaaggcgggcaaaaagaacggcgcttaggcgcgatttgcggcaccgcttttctcgaacaagcgctggcgattgaatggcaacacggcgatctcaccctgcgcggctgggtggccgatccaaatcacactacgcccgcactggcagaaattcagtattgctacgtgaacggtcgcatgatgcgcgatcgcctgatcaatcacgcgatccgccaggcctgcgaagacaaactgggggccgatcagcaaccggcatttgtgttgtatctggagatcgacccgcatcaggtggacgtcaacgtgcaccctgccaaacacgaagtgcgtttccatcagtcgcgtctggtgcatgactttatctatcagggcgtgctgagcgtgctacaacagcaactggaaacgccgctaccgctggacgatgaaccacaacctgcaccgcgtgccattccggaaaatcgcgtggcggctgggcgcaatcactttgctgaaccggcagttcgtgagccggtagctccgcgctactctcctgcgcccgcctcaggcagtcgtccggctgcctcctggccgaatgcgcagcctggttaccagaaacagcaaggtgaagtgtatcgccagcttttgcaaacgcccgctccgatgcaaaaaccaaaagcgccagaaccgcaggaacctgcacttgcggcgaacagtcagagttttggtcgggtactgactatcgtccattccgactgtgcgttgcttgagcgcgatggcaacatttcacttttatccttgccagtggcagaacgttggctgcgtcaggcacaattgacgccgggtgaagtgccagtttgcgcccaaccgctgcttattccgttgcggctaaaagtttctggcgaagaaaaatcggcattagaaaaagcgcagtctgccctggcggaactgggtattgatttccagtccgatgcgcagcatgtgaccatcagggccgtgcctttacccttacgccaacaaaatttacaaatcttgattcctgaactgataggctacctggcgaagcagtccgtattcgaacctggcaatattgcgcagtggattgcacgaaatctgatgagcgaacatgcgcagtggtcaatggcacaggccataaccctgctggcggacgtggaacggttatgtccgcaacttgtgaaaacgccgccgggtggtctgttacaatctgttgatttacatccggcgataaaagccctgaaagatgagtgatatcagtaaggcgagcctgcctaaggcgatttttttgatggggccgacggcctccggtaaaacggcgttagccattgagctgcgtaaaattttaccagtagagttgataagcgttgattctgcccttatttacaaagggatggatatcgggacggcgaagccgaacgctgaagagttactcgccgcgccgcaccgattgctgaatattcgcgatccgtcgcaggcttactcggctgctgattttcgccgcgatgcgctggcggaaatggccgatatcaccgcggcggggcggatcccactgttagtgggcggtacgatgttgtatttcaaggcattgctggaagggttgtcgccgctaccgtcggcagacccggaagtacgggccagaattgagcaacaggcggcagagcaaggttgggagtcattgcatcgtcaacttcaggagatcgatccggttgcggcagcaaggattcatccaaatgatccacaaaggctttcccgggcactggaagtttttttcatttcgggtaaaactttaacggaactgacgcaaacgtcaggagacgctctaccgtatcaggtgcatcagttcgccatcgccccggcgagccgtgaactgctccatcaacgaattgagcagcgttttcatcagatgttggcttcaggttttgaagcagaagtccgggcgctttttgcccgaggagatttgcatacggatttgccttccattcgttgcgtgggttatcgccagatgtggtcttaccttgaaggcgaaatctcatacgatgaaatggtttatcgaggtgtttgcgccacgagacagttggcgaagcggcagataacctggctgcgtggttgggaaggggttcactggcttgacagtgaaaaaccagaacaggcgcgtgacgaagtattacaggttgttggtgctatcgcaggctgaatgtgtacaattgagacgtatcgtgcgcaattttttcagaatcgaaaggttcaaagtacaaataagcatataaggaaaagagagaatggctaaggggcaatctttacaagatccgttcctgaacgcactgcgtcgggaacgtgttccagtttctatttatttggtgaatggtattaagctgcaaggacaaatcgagtcttttgatcagttcgtgatcctgttgaaaaacacggtcagccagatggtttacaagcacgcgatttctactgttgtcccgtctcgcccggtttctcatcacagtaacaacgccggtggcggtaccagcagtaactatcatcatggtagcagcgcgcagaatacttccgcgcaacaggacagcgaagaaaccgaataaggtttcgggctgtttttttacacggggagccagcgatcctgcgttccccgctgatctatttagagggttatacgcttgtttgaccgttatgatgctggtgagcaggcggtactggtacacatctattttacgcaagacaaagatatggaagacctccaggagtttgaatctctggtctcttccgccggtgtcgaagcattgcaggtgattaccggtagccgtaaagcgccgcacccaaagtattttgtaggtgaaggtaaagcagttgaaattgcggaagccgtaaaagcgacgggagcttcggtcgttctttttgaccatgccctgagcccggcgcaggagcgtaacctggagcgtttgtgcgagtgtcgtgtcatcgaccgcaccggccttattttagatattttcgcccaacgtgcgcgtacccatgagggtaagttgcaggttgagttggcgcagttgcgccatctggctacgcgcctggtgcgtggctggacccaccttgaaagacagaaaggcgggattggtttgcgtggtccgggtgaaacccagctcgaaaccgaccgtcgtttgttgcgtaatcgcatcgtgcagatacagtcgcgcctggaaagagttgaaaagcagcgtgagcaggggcggcaatcgcgtatcaaagccgacgttcctactgtttcgctggtgggatataccaacgccggtaaatctactcttttcaatcgaatcaccgaagcgcgggtctacgcggcagaccagttgtttgccaccctcgacccgacgttgcggcgtattgacgttgcggatgtcggtgaaaccgtgttggcagataccgtagggtttattcgccacctgccgcatgatctggtggcggcatttaaagccacgttacaagagacgcggcaagccacattgctgctgcacgtcattgacgcggcggatgtgcgtgtacaagaaaacatcgaagcggtgaatacggttcttgaagagattgatgctcacgagatcccaaccctgctggtgatgaacaagatcgatatgctggacgatttcgaaccgcgtattgacagagatgaagagaacaaaccgatccgtgtctggctttctgcgcagaccggagcggggataccacagctttttcaggctttgacggagcgtctttccggcgaggtggcgcagcatacattgcgtctgccgccgcaggaagggcgcctgagaagtcgtttttatcagcttcaggcaatagaaaaagagtggatggaggaggacggcagcgtaagtctgcaagttcgtatgccgatcgttgactggcgtcgcctctgtaaacaagaaccggcgttgatcgattacctgatctaacggcgtagcgtctgaagcgtggagtcatatcctctggcgtcgaaagacaacagggatcaccgcataacaaatatggagcacaaacatggcgtggaatcagcccggtaataacggacaagaccgcgacccgtggggaagcagcaaacctggcggcaactctgagggaaatggaaacaaaggcggtcgcgatcaagggccacctgatttagatgatatcttccgcaaactgagcaaaaagctcggtggtctgggcggcggtaaaggcaccggatctggcggtggcagttcatcgcaaggcccgcgcccgcagcttggcggtcgcgtcgttaccatcgcagcggcagcgattgtcattatctgggcggccagtggtttctataccattaaagaagccgaacgcggcgtggtaacacgctttggtaaattcagccatctggttgagccgggtctgaactggaaaccgacgtttattgacgaagtcaaaccggtgaacgtggaagccgtgcgtgaactggcagcttctggtgtgatgctgacgtctgacgagaacgtagtgcgcgttgagatgaacgtgcagtaccgcgtcaccgatccggaaaaatatctgtatagcgtgaccagcccggatgacagtctgcgtcaggctaccgacagcgccctgcgcggggttatcggtaaatacaccatggaccgcattctgacggaaggtcgtaccgtgattcgtagcgatactcagcgcgaactggaagagacgattcgtccgtatgacatgggcatcactctgctggacgtcaacttccaggctgctcgtccgccggaagaagtaaaagcggcgtttgacgatgcgattgccgcgcgtgaaaacgaacagcaatacattcgtgaagcagaagcgtataccaacgaagttcagccgcgtgcgaacggtcaggcgcaacgtatcctcgaagaggcgcgtgcgtacaaggcccagaccatcctggaagctcagggtgaagtggcgcgctttgctaaacttctgccggaatataaagccgcgccggaaattactcgcgagcgtctgtatatcgagacgatggaaaaagtgttgggcaacacccgcaaagtgctggttaacgataaaggtggcaacctgatggttctgccattagaccagatgctgaaaggtggtaacgcccctgcggcgaagagcgataacggtgccagcaatctgctgcgtctgccgccagcctcttcctccacaaccagtggagcaagcaacacgtcgtccaccagtcagggcgatattatggaccaacgccgcgccaacgcgcagcgtaacgactaccagcgtcagggggaataacgatgcgtaagtcagttatcgcgattatcatcatcgtgctggtagtgctttacatgtctgtctttgtcgtcaaagaaggtgagcgcggtattacgctgcgttttggtaaggtactgcgtgacgatgacaacaaacctctggtttatgagccgggtctgcatttcaagataccgttcattgaaacggtgaaaatgctcgacgcacgtattcagaccatggacaaccaggccgaccgctttgtgaccaaagagaagaaagacctgatcgtcgactcttacatcaaatggcgcatcagcgatttcagccgttactatctggcaacgggtggtggcgacatttcgcaagcggaagtgctgttgaaacgtaagttctctgaccgtctgcgttctgaaattggtcgcctggacgtgaaagacatcgtcaccgattctcgtggtcgtctgaccctcgaagtacgtgacgcgctgaactccggttctgcgggtacagaagatgaagttactacccctgcagcagataacgccattgccgaagcggcagagcgcgtaacggctgagacgaagggcaaagttccggtcatcaatccgaacagtatggcggcgctgggtattgaagttgtcgatgtgcgaattaagcagatcaacctgccgaccgaagtgtctgaagcgatctacaaccgtatgcgcgccgagcgtgaagcggtagcgcgtcgtcaccgttcacaaggtcaggaagaagcggaaaaactgcgtgcaactgccgactatgaagtgaccagaacgctggcagaagctgagcgtcagggccgcatcatgcgtggtgaaggcgatgcagaagcagccaaactgtttgctgatgcattcagtaaagatccggacttctacgcattcatccgtagcctgcgtgcttatgagaacagcttctctggcaatcaggacgtgatggtcatgagcccggacagcgatttcttccgctacatgaagacgccgacttccgcaacgcgttaatataacgactgcggtacaggtcaataaagccaccacatcctcagggatgtcggtggttttctttttctataaggataatgaatgaattcgacaatctggctggcgcttgccctggttttggtactggaaggtttagggccgatgttttacccgaaggcatggaagaagatgatctctgcgatgaccaatttgcccgataatattttacgtcgttttggcggtggacttgtggttgcgggcgttgtggtctactacatgttgaggaaaacgattggctgaacaaaaaacagactgatcgaggtcatttttgagtgcaaaaagtgctgtaactctgaaaaagcgatggtagaatccatttttaagcaaacggtgattttgaaaaatgggtaacaacgtcgtcgtactgggcacccaatggggtgacgaaggtaaaggtaagatcgtcgatcttctgactgaacgggctaaatatgttgtacgctaccagggcggtcacaacgcaggccatactctcgtaatcaacggtgaaaaaaccgttctccatcttattccatcaggtattctccgcgagaatgtaaccagcatcatcggtaacggtgttgtgctgtctccggctgcgctgatgaaagagatgaaagaactggaagaccgtggcatccccgttcgtgagcgtctgctgctgtccgaagcatgtccgctgatccttgattatcacgttgcgctggataacgcgcgtgagaaagcgcgtggcgcgaaagcgatcggcaccaccggtcgtggtatcgggcctgcttatgaagataaagtggcacgtcgcggtctgcgtgttggcgaccttttcgacaaagaaaccttcgctgaaaaactgaaagaagtgatggaatatcacaacttccagttggttaactactacaaagctgaagcggttgattaccagaaagttctggatgatacgatggctgttgccgacatcctgacttctatggttgttgacgtttctgatctgctcgaccaggcgcgtcagcgtggcgatttcgtcatgtttgaaggtgcgcagggtacgctgctggatatcgaccacggcacttatccgtacgtaacttcttccaacaccactgctggtggcgtggcgaccggttccggcctgggcccgcgttatgttgattacgttctgggtatcctcaaagcttactccactcgtgtgggtgcaggtccgttcccgaccgaactgtttgatgaaactggcgagttcctctgcaagcagggtaacgaattcggcgcaactacgggtcgtcgtcgtcgtaccggctggctggacaccgttgccgttcgtcgtgcggtacagctgaactctctgtctggcttctgcctgactaaactggacgttctggatggcctgaaagaggttaaactctgcgtggcttaccgtatgccggatggtcgtgaagtgactaccactccgctggcagctgacgactggaaaggtgtagagccgatttacgaaaccatgccgggctggtctgaatccaccttcggcgtgaaagatcgtagcggcctgccgcaggcggcactgaactacatcaagcgcattgaagagctgaccggtgtgccgatcgatatcatctctaccggtccggatcgtactgaaaccatgattctgcgcgacccgttcgacgcgtaattctggtacgcctggcagatattttgcctgccgggctaacagtgtgatacattgctgtgtcggttaagccattacgctatccgacacagtgttaaatcctcgcttttttccttccccgaactgaaataaattagcgacacagcttgtggctggtttatcatcaatataaatgtatttttccccgatttcccttttgaggttgatgtgcagttaacgagtttcactgattacggattacgtgcgctgatctacatggcgtcattgccagaagggcggatgaccagtatttctgaagtgactgacgtctacggcgtctcccgtaatcatatggtcaaaataatcaatcaacttagtcgtgccggctacgtgactgctgttcgtggaaaaaatggcggcattcgcttgggtaaaccggcgagtgcaatacgtattggtgatgtggtgcgcgagctggagcccttatcgctggtgaattgcagcagtgagttttgccacattacacctgcctgtcggttgaaacaggcgctttctaaggccgtgcaaagttttcttacggaactggataactacacgcttgccgatttggttgaagagaatcaaccgctttataaattattgctggtggagtgacgaaaatcttcatcagagatgacaacggaggaaccgagatgtcacaagatcctttccaggaacgcgaagctgaaaaatacgcgaatcccatccctagtcgggaatttatcctcgaacatttaaccaaacgtgaaaaaccggccagccgtgatgagctggcggcagaactgcacattgaaggcgaagagcagcttgaaggcctgcgtcgccgcctgcgcgcgatggagcgcgatggtcaactggtcttcactcgccgtcagtgctatgcgctgccggaacgcctcgacctggtgaaaggtatcgttattggccaccgtgatggctacggctttctgcgagttgaagggcgtaaagatgatttgtatctctccagcgagcagatgaaaacctgcattcatggcgatcaggtgctggctcagccgctgggcgctgaccgtaaaggtcgtcgtgaagcgcgtattgtccgcgtactggtgccaaaaaccagccagattgttggtcgctacttcaccgaagcgggcgtcggctttgtggttcctgacgatagccgtctgagcttcgatatcttaatcccgcccgatcagatcatgggcgcgcggatgggctttgtggtggtggttgaactgactcaacgcccgactcgccgtaccaaagcggtgggtaaaatcgtcgaagtgctgggcgacaatatgggcaccggcatggcggttgatatcgctctgcgtacccatgaaattccgtacatctggccgcaggctgttgagcaacaggttgccgggctgaaagaagaagtgccggaagaagcaaaagtgggccgtgtcgatctgcgcgatttaccgctggtcaccattgatggcgaagacgcccgtgactttgacgatgcagtttactgtgagaaaaaacgcggcggcggctggcgtttatgggtcgcgattgccgacgtcagctactatgtgcgtccgccaacgccgctggacagagaagcgcgtaatcgtggtacgtcggtgtacttcccttcgcaggttatcccgatgctgccagaagtgctctctaacggcctgtgttcgctcaacccgcaggtagaccgcctgtgtatggtgtgcgagatgacggtttcgtcgaaaggccgcctgactggctacaaattctacgaagcggtgatgagctctcacgcgcgtctgacctacaccaaagtctggcatattctgcagggcgatcaggatctgcgcgagcagtacgccccgctggttaagcatctcgaagagttgcataacctctataaagtgctggataaagcccgtgaagaacgcggcgggatctcatttgagagcgaagaagcgaagttcattttcaacgctgaacgccgtattgaacgtatcgaacagactcagcgtaacgacgcccacaagttaattgaagagtgcatgattctggcgaatatctcggcggcgcgtttcgttgagaaagcgaaagaaccggcactgttccgtattcacgacaagccgagcaccgaagcaattacctctttccgttcagtgctggcggagctggggctggaattgccgggcggtaacaagccggaaccgcgtgactacgcggagctgctagagtcggttgccgatcgtcctgacgcagaaatgctgcaaaccatgctgctgcgctcgatgaaacaggcgatttacgatccggaaaaccgtggccacttcggtctggcattgcagtcctatgcgcactttacttcgccgattcgtcgttatcctgacctgacgctgcaccgcgccattaaatatctgctggcgaaagagcaggggcatcagggcaacaccactgaaaccggcggctaccattattcgatggaagagatgctgcaactgggtcagcactgttcgatggcggaacgtcgtgccgatgaagcaacgcgcgatgtgtctgactggctgaagtgtgacttcatgctcgaccaggtaggtaacgtctttaaaggcgtaatttccagcgtcactggctttggcttcttcgtccgtctggacgacttgttcattgatggtctggtccatgtctcttcgctggacaatgactactatcgctttgaccaggtagggcaacgcctgatgggtgaatccagcggccagacttatcgcctgggtgatcgcgtggaagttcgcgtcgaagcggttaatatggacgagcgcaaaatcgactttagcctgatctccagcgaacgcgcaccgcgcaacgtcggtaaaacggcgcgcgagaaagcgaaaaaaggcgatgcaggcaaaaaaggcggcaagcgtcgtcaggtcggcaaaaaggtcaactttgagccagacagcgccttccgcggcgagaaaaaaccgaagccgaaagcagcgaagaaagacgcgagaaaagcgaaaaagccatcggcgaaaacgcagaaaatagccgcagcgaccaaagcgaagcgtgcggcgaagaaaaaagtggcagagtgatcattaccctcttcaaacagaagagggtgaattatccgtaggccgggcaagcgtggcgctcccggcaaaacgtaaacaacgagtacattaatgagcgaaatgatttacggcatccacgcagtgcaggccctgctggagcgcgcccctgaacgttttcaggaagtctttattttaaaaggccgtgaagataaacgtctgttgccgctgattcacgcccttgagtcccagggcgtggttatccagctggcaaaccgccaatatctcgacgagaaaagcgacggtgccgtgcatcagggcattatcgcccgtgtgaagccaggacgtcagtatcaggaaaacgatctgccggatctgatcgcttcgctcgatcaaccgttcctgctgatcctcgacggtgtaaccgatccgcacaacctcggcgcgtgcctgcgcagcgcggacgccgctggcgttcatgcggtgattgtgccgaaagatcgctccgcacagctcaacgccacggcgaaaaaagtggcctgcggcgcggcagaaagcgttccgctgattcgggtgactaacctggcgcgcaccatgcgtatgttgcaggaagagaatatctggatcgtcggtacggcaggtgaggcggatcatacactttatcagagcaaaatgaccggacggctggcactggtgatgggcgcggaaggtgaaggtatgcgtcgcctgacccgtgaacattgcgatgagttgatcagcatcccaatggcaggaagtgtttcttcgctgaacgtttctgtggcgacaggcatttgcttatttgaagcggtacgccagcgtagctaatttctcggaattatgaaaagccatccagatttggatggtctttttttgtctatagctggtaagataattacgtactgcaaatattcattttattaatatttaaacttaatttatatggaataatatatgacatggaatccgttggcgctggcgacggcgctgcaaactgtacctgaacaaaatattgatgtaacaaatagcgaaagcgtattaattattaaaatgaatgattatggcgatttgcaaatcaatattctttttacttcccgccaaatgatcatcgaaacctttatttgtccggtaagtagtatcagcaatccagatgaatttaataccttcttattaagaaatcagaagctgatgccattgtcatcggtagggatctccagcgtgcaacaggaagagtattacattgttttcggtgcattatcgcttaaatcttctcttgaagatatcctgcttgagataacctcgctggtagataacgcattggatctggctgaaattacagaagaatattcacactaattacaaggacgggtatttatgggaattttaaaaagtttatttacgctggggaaatcgtttatctcccaggcggaagagtccattgaagaaacccagggcgtgcgcatgctggaacagcatattcgtgacgctaaagctgaactcgataaagccggaaaatctcgcgttgatctgctggcgcgagtgaaattaagtcacgataagctgaaagatttacgtgagcgcaaagccagtctggaagctcgtgcgctggaagcgttaagcaagaacgtgaatccgtcgttgattaacgaagttgctgaagaaatcgcgcgccttgagaatctcattaccgctgaagagcaagtgttgtcgaatctggaagtctctcgtgatggcgtggaaaaagcagttacagcgacagcgcagcgtatcgctcagtttgagcagcaaatggaagtcgttaaagccactgaagccatgcagcgtgcacaacaggctgtaacgacctctactgttggcgcatcttccagcgtttcgacagcggcagaatccttaaaacgcctgcaaacgcgtcaggccgaacgtcaggctcgcctggatgctgccgcacagttggaaaaagtcgcagacggtcgcgatctcgatgaaaagctggcggaagccggaattggcggtagcaataaaagtagcgcccaggatgtattagcaagactgcaacgccaacagggcgagtaattttttgccagcctcactgcaaggctggcaactattttaaggataaaatatgtctggttttttccagcgtctgtttggcaaggataataagcctgctatcgctcgcggtccgttgggtctgcatctcaatagtggttttacgctcgatacgttagcgtttcgtttgctggaagatgcattgctgattgcgctgccgggtgaggaatataccgtggccgccgtcagttgcatcgatctgggcgggggtagccagattttccgttactacacttcgggcgatgagttcctgcaaatcaataccactggcggcgaagatattgatgacattgatgatatcaagctctttgtctatgaagagagctacggtatcagtaaagagagtcactggcgcgaggcgatcaacgccaaagtgatgggggcaatgaccttaaactggcaggaaaaacgctggcagcgattttttaacagcgaagaaccgggaaatatcgaacccgtctacatgctggaaaaagtagaaaatcaaaaccatgccaaatgggaagtgcataattttagcatgggctaccaacggcaggtgaccggagatacttacgaatatttgctgttaaatggtgaggaatcttttaacgatctcggcgagccggagtggttattttcgcgcgcgctgggtgtcgatatcccgctgacatcacttcatattattggttaattacaaggacgtttacaatgcatatactggattcacttcttgcctttagtgcctatttttttattggcgtggcgatggtgattattttcctgtttatctactccaaaattacaccgcacaacgaatggcagttaatcaaaaacaataacaccgcggcggcactggcgttcagcggaacattgttggggtacgtgatccccttatccagtgcggcaatcaatgcggtgagtattccagactatttcgcatggggcgggattgctctggtgattcaattactcgtttttgctggcgtcaggctttatatgcccgcattaagcgaaaaaattattaatcacaataccgcagcaggaatgtttatgggaaccgccgcgctggctggcggtatttttaacgcagcttgtatgacatggtaatggacgatcatggccagaaaacgcaaatccagaaataacaaaaatatcggacatggggcaatcagtcgcattggtagaccgcataatccttttgagccgcgccgcaatcgctacgcacaaaaatacttaacgttggcactaatgggcggtgccgcttttttcgtattgaaaggttgtggcgatagtggcgatgtcgataacgacggcgacggaacgttttactcgactgtgcaggattgtattgatggcggtaataattcagatatctgtgctcatggctggaacaacgccaaagcggcgttttatgccgatgttccgaagaatatgactcagcagaattgtcagtctaagtatgaaaattgttactacgacaacgttgaacagagttggatcccggttgtttctggatttttgttaagccgggttattcgtaaagatcgcgatgagcagtttgtttataacagcggcggttcctcttttgcttcgcgccccgtctggcgcaacacttccggtgattactcctggcgctccggttctggcaaaaaagagtcttattcttcgggcggctttaccaccaaaaaagcgtcaaccgtttctcgcggcggctatggtcgttcttccagcgcccgtgggcattggggaggctaatcatgctgagacacaacgttcctgtgcggcgggatctggaccggattgccgccgataacggatttgactttcatatcatcgacaatgaaatctattgggatgagagtcgggcttatcgctttactttgcgccagattgaagagcagatcgaaaaaccgactgcggaactgcatcagatgtgcctggaggtggtggatcgtgcggttaaagatgaagagatcctgacgcaactggcgatcccgccgttgtactgggatgtgatcgccgaaagctggcgcgcacgcgatccttcgttgtatggccgtatggattttgcctggtgtggtaatgcaccggttaagttgctggagtacaacgccgatacgccaacttcattgtacgagtcggcttatttccagtggttgtggctggaagatgcccggtgcagcggcattattccgcgcgatgccgatcagtacaatgccattcaggagcgcctgatttcacgctttagcgagctttacagtcgggaaccgttttatttttgctgctgtcaggataccgacgaagacaggagtaccgtgctgtacttgcaggactgcgccgagcaggcagggcaggagtctcggtttatctacattgaagatctcggtttgggcgtcggcggcgtactgaccgatcttgatgataatgtcatccagcgtgcatttaagctgtatccgctggagtggatgatgcgtgacgataacggcccgctgctgcgcaagcgtcgtgagcaatgggtggagccgttatggaaaagtatcttgagtaataaagggctaatgccgctgctttggcgcttcttccctggtcatcctaaccttcttgcatcctggttcgatggtgaaaaaccgcagattgccgctggcgaaagctatgtgcgtaaaccgatttactcgcgcgaaggcggaaacgtcaccattttcgacggtcagaataacgttgttgaccacgctgatggtgattacgccgatgaaccgatgatctaccaggcgtttcaacctctgccgcgatttggcgatagctacacactcatcggtagctggattgtcgatgatgaagcgtgcggaatggggatccgtgaagataacacgttgatcaccaaagacacctcacgtttcgttccgcattacattgctggataagaatgttttagcaatctctttctgtcatgaatccatggcagtgaccatactaatggtgactgccattgatggagggagacacagtgcactggcaaactcacaccgtttttaatcaacctataccattaaataacagcaacttatacctgtctgatggcgcgctttgcgaagcggtaacgcgtgaaggtgctagctgggatagcgattttctcgccagtattggtcagcagttaggaacggctgaatcccttgaactggggcggctggcgaatgtgaatccgcctgaattattgcgctacgatgcgcaaggacgccgtctggacgatgtgcgttttcaccccgcctggcacctgctgatgcaggcgctatgtaccaatcgggtgcacaatcttgcctgggaagaagacgctcgctccggcgcatttgtggcgcgcgcggcgcgttttatgttacatgcgcaggttgaggctgggtcgttatgtccgataacgatgacctttgccgccacgccattgttgttacagatgttacccgcgccgtttcaggactggaccacgccgctgctgagcgatcgctacgattctcacttattgccaggtgggcaaaaacgtggcttgttgatcggcatgggaatgacggaaaagcagggcggttccgatgtcatgagcaacaccacccgcgcagagcgtctggacgatggttcttatcggctggtggggcataaatggtttttctcggtgccgcaaagcgatgcgcatctggtgctggcacagaccgcgggcggtttgtcctgcttttttgtgccgcgctttttgcctgacgggcaacgcaacgcgattcgcctcgagcggctgaaagataagctgggtaatcgctctaacgccagctgcgaagtggagtttcaggatgccattggctggttgttggggcaggaaggggaaggaattcgtctgatcctgaaaatgggtgggatgacgcgttttgattgcgccctgggtagccatgccatgatgcgccgtgcattttcgctggcgatttaccatgcacatcaacgccatgtttttggtaatccattgatccaacagcctcttatgcgtcatgtcttaagtcgcatggcacttcagcttgaagggcaaacggcgttgctgtttcgtcttgcgcgagcgtgggaccggcgcgccgatgccaaagaagctctgtgggcgcgtttatttacgcctgcggcgaaatttgtgatctgcaaacgtggcattccgtttgtggccgaagcgatggaggtgctgggcggcattggttattgcgaggagagcgagctgccgcggctttaccgggagatgccggtaaacagtatttgggaaggttccggcaatattatgtgcctggatgtgctgcgcgttctcaataagcaagcgggcgtatacgacttattgtcggaagcatttgtggaagtgaaagggcaggatcgctattttgatcgcgcggttcgtcgtttacagcagcagctgcgtaagccagctgaagaattggggcgagagattactcatcagctattcctgctgggctgcggtgcgcaaatgttgaaatatgcctctccgccaatggcgcaggcgtggtgtaaggtgatgttagatacgcgcggcggcgtacggttgtcagagcagatccagaatgatttattgctgcgggcgacgggaggagtgtgtttgtaagcgtatacgactgatgcgacgcaggtttcgattaactaaatgaaatattttaaaattgtaggccggacaaggcgctcgcgccgcatccggcattgttcatttgctgtagatgacactcacgcatacagtatcgcctgtacgcgccagttatcaggctgctggtcttcgtacatggtaataatgcggtaccatgacgcaccttgttcatcggcctttaacgccacgatacgttccacgtcctgcggatcccctgaaatattgctaactgagatctgacctatttcattcaggcccgtcacgcagtcagcactggcgaattctgcagactgtgccgtggcgctcgcaggataagtcactaattgcagcgagggtgaggcaagtaattgtttcatcgtcagctccatttttcgtttccccacatgttgcagggcattccatcgcggtaataaacgcccgagcttccagccggtaatttattgtgcacaggtaaacgcatagggacgcaaagcaatgtaaagctgactatgtaagttgtctgatttatttacggtacaaaatggcttgtgaataccactgtcctgtcacgatggtttcgtccaccatgacgacaacgtaataatcagcttttgcagcgacagctttcgctctgatttctgctaatgcgtcatccggagaaccccgaaccatcgtgcttacgctacctattcgctgtaacccttgcgtctggtcgcggcgaatctcttgcggatggtccgttactggcggtgctggctgtggcgtaccttgcagtgcgctacaggcacttaacatcaacaccaataataaactggcaaaccggtaaataacgctattacgtttcctgctaaccatagtgtagtgccttattaatttaactttgggggaatgttcccgaattgttacctggtacgcgattttcgaatgaaaacgtgacgaaagcgtaacccacatctcaacattatgaactaataccgccagcagaaacttgtgctaaggatttcttcatgtcataccagacaaaaaggagagacagatgattgaaatagaatcacgcgagctggcagatattcccgttcttcatgcttatcctgtcgggcaaaaagataccccgttaccgtgtgtgattttttatcacggctttacttcgtccagtctggtgtatagctattttgccgttgcgctggcgcaggctggtttgcgggtgatcatgccggatgcgcccgatcacggtagccgttttagtggcgacgcagcgcggcggttaaatcaattctggcaaatcttgctacaaagtatgcaggaattcactaccttacgtgcggcaatagccgaagaaaactggctgcgtgatgaccgtctggcagtcggtggcgcgtcgatgggcgcgatgacggcactgggaattaccgctcgccaccccacgataaaatgtaccgccagcatgatgggatcgggctattttacatcgctcgcccgttcactgtttccaccgctgatacctgaaacggcagcacagcagaatgaattcaataacattgtcgcgccgctggcagagtgggaagcgacaaaccacctggaacaacttggtgacagacctctactgctgtggcatggccttgacgatgacgtcgtgcctgccgacgaatcactacgtttgcagcaggccttaagcgagacggggcgggataaactgctaacctgttcatggcagccaggcgtgcgtcaccgcattacgcctgaggcgttagatgctgccgtgacatttttcctccagcatctttaaacacgcagaatgctgaccccttgcgcttccagctgttgcaggatttccgggttagcatttttgccggtgatcagcatatcgatttgatcggcacggctaaaaagcattcccgcgcgttcgccaatcttactgctatcaaccagtaccaccagtttccctaccacgctcagcatcttctgctctgccattgccgtcagcatatcggttttatacaacccttctgctgtcagtcctttgccgctggtaaacatccagtgcccggcatagagactgttttcgctgccttgcgggcttaaagtgatggactgacttttgttgtactgtccgcccataatgatcacgctgtcatgctcctgatcgatcaggtaatttgccagcggtagataattagtgatgatttgcactggcttgccacacatttcccgcccaagcagaaacgcggtggagccgcagttgatgactacgctttcgcccggattaaccagctgcgaggccgctttagcaatacgtactttttcatcgtgattctgcgcttgatgcagattcatcggcgtccagcgcgggcgctgttgggtaatagcttctgcgccattgcgcacttttttcagtttgccgctttcgtcaagtttattgatatcgcgtcgtgcagtggcgggcgaaattcccagacgctcaacgactttctcaacggtcacaaagcccaattgtgcgagcatttccaggaggatttgatgtctttgtgcttcagtcatgagctattccgataaaatttgatttttttagatgatatttgaaatagccaggaaatactatgccggatagcgcgagcatctccacgctatccggtacaagcgacagattacaggaacgacttgaacggcagatctggttcaatagtgaagcaatcatcgaaaccacgcggatagtggtactcgaagttgtctttatccagcggccaggtaaatttgccgccgacctgccagataaacggcttgaagccatacttcaggcgatcttttttcatctcccacagcacgcggatctcttgcggatcggcctggaagtttgaccagatatcgtggtggaacgggatcactactttcgcattcagcgcttcgcccatacgcaagatatcagcactggtcattttgtcggtaataccgcgtgggttttcgccgtatgaacctaaagccacgtcgatctgatgctcattaccatgttttgcatagtagttagagtagtgggaatcgccgctgtgatacagggtaccgcctggggttttgaacagatagttcaccgcgcgatcgtccatgccgtccggcagtacgccagctgctttttgatcggcaggcagggtgatcagtgccgtgcggtcgaaagcgtcaagtgcatgaatttcaatgtcttttaccttcactacgtcgcccggtttaacgacgatgcaacgctctttcggtacgccccagccaatccacaaatcaacgcaggttttcggtccaatgaacggtacgtcatcagcacagttctgcatcacggcagcagcgacgttaacgtcgatatgatcgttgtgatcgtgagtcgccagtaccgcgtcgatctggcgaatcgcaaacggatcaagaacaaacggggtggtgcgcaggtttggctgcagttttttcacgccagccatgcgctgcatctggtgaccctgtttcattaacgggttaccgtggctttgtttgccagtaccgcaccaaaaatcaacacaaacgttggcaccgccttctgatttcaaccagatcccggtacagccgagccaccacattgcgaaagtgccaggtgcgacctgctcttgctcaatttcttcattcagccagctaccccactccgggaaagtgctcaggatccaggactcacgggtgatacttttcactttactcatcgccatttaccttcgtgatagttcaattcgaatcaatatgtgattggttttgattaatcctgacactattttttcaggaaggcaatgaccattttttgactttttagcaggagagttattgtggattttgagtgtggaaagattaaattgaatgtgtaatgcaattaactaaatgaatttaaatgaataaatatttcattatgtgaatcccattctgtttatatggaattatttgcgtgcgacgtcacatttaatcataaataatcttgttgtgattacttttgaaaattagagtgagagcacaacattccgggtgtacgaaatacccggttacctcttcttcaggagatcgttatggagatcctctacaacatctttaccgtgttttttaaccaggtcatgaccaatgccccgttgttgctgggtattgtgacctgtctgggttacatcctactgcgcaaaagtgtcagcgttattattaaaggtacgattaaaaccataattggtttcatgttgttgcaggcagggtccggcatcctgaccagcaccttcaaaccggtggtggcgaaaatgtccgaagtctacggcattaacggcgcaatttccgatacttacgcgtcgatgatggcaaccattgaacgcatgggcgatgcctatagctgggtgggttacgcggtgttgttagcgctggcgctgaacatctgttacgtgctgctgcgtcgcattaccggtattcgtaccatcatgctgactggtcacatcatgttccagcaggcggggctgattgccgttacgctgtttatcttcggctactccatgtggacgaccattatctgcaccgcgattctggtttcgctctactggggcattacctccaacatgatgtacaagccgacacaggaagtgaccgacggctgtggtttctccattggtcaccagcaacagtttgcatcatggattgcctataaagttgcgccgttcctcggcaaaaaagaggaaagcgttgaagacctcaaactgccaggctggctgaatattttccacgacaacatcgtctccacggcgattgtcatgactatcttctttggtgccattctgctctcctttggtatcgacaccgtgcaggcgatggcaggcaaagtgaactggacggtgtacatcctgcaaaccggtttctcctttgcggtggcgattttcatcatcactcagggcgtgcgcatgtttgtggcggagctctctgaagcattcaacggtatctcccagcgcctgatcccgggtgcggttctggcgattgactgtgcggctatttatagcttcgcgccgaacgccgtggtctggggttttatgtggggcaccatcgggcaactgattgcggttggcatcctggtcgcctgtggctcttcaatcctgattattccaggctttatcccgatgttcttctccaacgccactatcggcgtgttcgctaaccacttcggcggctggcgcgcggcgctgaagatttgcctggtgatggggatgatcgaaatctttggttgcgtctgggcggtgaaactcaccggtatgagcgcctggatgggcatggcggactggtcgattctggcaccgccgatgatgcagggcttcttctccatcggtatcgcctttatggccgtcatcattgtcattgcactggcttatatgttcttcgctggccgcgcactgcgtgcagaagaagatgcagaaaaacaactggcagaacagtctgcttaataaggagttttgattatgaccgtacgtattctggctgtgtgtggcaacggacaaggcagttccatgatcatgaagatgaaagtggaccagtttttaacccaatcaaacattgaccacacggtaaatagctgcgcggttggcgaatacaaaagcgagttgagcggcgcggatatcatcatcgcttctacgcacattgcgggcgaaatcaccgtgaccggcaacaaatatgtggttggcgtgcgcaacatgctctctcctgctgactttggcccgaaactgctggaagtgatcaaagcgcatttcccgcaggatgtgaagtaaggacgcgccatgaaattacgtgattcgctggcggaaaataaatctatccgcctgcaggccgaagcaaatacctggcaggaagcggtgaaaatcggtgttgacctgctggtagcggcagatgtggtagagccgcgttactaccaggcgattctggatggcgttgaacagtttggtccttatttcgttatcgcaccgggactggcgatgccgcacgggcgtccggaagagggcgttaagaaaaccggtttctctctggtaacgctgaaaaagccgctggagttcaaccacgaagataacgatccggtggatatcctcatcaccatggcggcggtcgatgccaacactcaccaggaagtgggcatcatgcagatcgttaacctgtttgaagatgaagagaatttcgaccgtttacgcgcctgccgtaccgagcaggaagtactggatttaattgaccgcaccaacgcggcagcttaagaaggaattgaagatgtcattaccaatgttgcaagtcgcgctggacaaccagactatggatagcgcctacgaaaccactcgcctgattgccgaagaagtcgacattatcgaagtgggcaccattctgtgcgtgggcgaaggcgtgcgtgcggttcgtgacctgaaagcgctttacccgcacaaaatcgtactggcagacgccaaaattgccgatgcgggcaaaatcctttctcgtatgtgcttcgaagctaacgctgactgggtgaccgtgatttgctgtgcggatatcaacaccgccaaaggtgcgctggacgtggcaaaagagtttaacggcgacgtgcagatcgaactgaccggttactggacctgggaacaggcgcaacagtggcgcgatgcaggcattcagcaggtggtttatcaccgcagccgtgacgcacaggccgcaggcgtggcgtggggcgaagctgacattaccgcgatcaaacgtctttccgatatgggcttcaaagtcaccgttactggtggcctggcgctggaagatctgccgctgttcaaaggcattccgattcatgtgtttatcgctggtcgcagcatccgtgatgccgcttctccggttgaagccgcgcgtcagttcaaacgttccatcgccgaactgtggggctaaggagcggatatgttgtccaaacaaattccgcttggcatctatgaaaaagcgctccccgccggggagtgctggctggaacggctgcaactggcaaaaacgttaggcttcgattttgtcgagatgtcggtagatgaaactgacgatcgcctgtcgcgcctcgactggagccgcgagcagcgtctggcgctggtgaatgcgattgttgaaactggcgtgcgcgtgccgtccatgtgcctttctgctcatcgtcgtttcccgctgggcagcgaagatgacgcggtacgggcgcaggggctggagattatgcgcaaagctatccagttcgcccaggacgtcggcattcgcgtgatccaactggcgggctatgacgtttactatcaggaagccaataacgaaacgcgtcgtcgtttccgtgacggcctgaaagagagcgttgagatggcaagccgcgcgcaggtgacgctggcgatggagatcatggattacccgttgatgaactccatcagtaaggcgttgggttacgcgcactatctcaacaacccatggttccagctctacccggatatcggcaacctgtcggcgtgggacaacgacgtgcagatggaattgcaggccggaatcgggcatatcgtcgcggtgcatgtgaaagacaccaaaccaggcgtcttcaaaaacgtgccgtttggcgaaggcgtagtggattttgaacgttgcttcgaaacgctcaaacagagtggctattgcgggccgtacctgattgagatgtggagcgaaacggcggaagacccggcggcggaagtggcgaaagcgcgtgattgggtgaaagcgcgcatggccaaagctggcatggtggaggcggcataatgcaaaagctgaaacagcaggtatttgaagccaacatggatctgccgcgctacgggctggtgacctttacctggggcaacgtcagcgccatcgaccgcgaacgcgggctggtggtgatcaagcccagcggcgtcgcctacgaaaccatgaaagcagacgatatggtggtggtcgatatgagcggcaaggtagtggaaggggagtatcgcccgtcttctgacaccgcgacgcatcttgaactctaccgtcgttatccgtcgcttggtggtattgtccatacccactccactcatgccaccgcatgggcgcaggcggggctggcgatcccggcgttaggcaccacgcacgccgattacttctttggcgacatcccgtgcacgcgcggattaagcgaagaagaggtgcagggtgagtacgaactgaataccggcaaagtaattatcgaaacgctgggtgacgccgagccgctgcatacgccgggaattgtggtgtatcagcacggaccgttcgcctgggggaaagatgcccacgacgcggtgcataacgcggtggtgatggaagaagtggcgaaaatggcgtggattgcgcgtagtattaacccacaactgaatcacatcgacagcttcctgatgaataaacacttcatgcgtaagcacggtcccaacgcttattacgggcagaagtaaaacacgcgctgcggaaatttccttcttcgggagataactggtctaattccgcagccgtttttcaaaaaaagccccctgcgaagggggcaaagcaaactatggcaatgtttcgttggttatacctggtgctagcgataaatatccgcgctggcgtgcatattgccgttactccccggttcccgcatcagaatcacatggtagtacgttgcgccttgcgcatctgtctcttcatttaatgcctgacgtgcttcactctcagtggcgaagttatgattgatataaatcacgcctaagctttgcacatcgtccatatttctggcctggtggttattaatttcaatggctgcccatgtatttgcacttagcaaaagcacagccagaagggctaaaacgcgactgaacatagatacctcctcgacggctgactttgtgtgctctcctcttgtggtgatcttctgatttaattttaatcaatgataaagaagttgatggtgaccatttctgatgcagttgttcaaaaaaacaccatgacgaagtgtgatgaactccaaatcagcggtttagaggttatttgcgaaaggggagatttatttcggctctgcccttgagttttgcggggtatgtcagtactataacgcgtcatttttcagccgacctttaacacgttccttgcctccccgggattcggctgacccagacaggaggctgaataatccgtaaggagcaattcgatgcgtcattacgaaatcgtttttatggtccatcctgaccagagcgaacaggttccgggcatgatcgagcgctacactgctgccatcactggtgcagaaggcaagatccaccgtctggaagactggggccgccgtcagctggcttacccgatcaacaaactgcacaaagcacactacgttctgatgaacgttgaagctccgcaggaagtgatcgatgagctggaaactaccttccgcttcaacgatgccgttatccgcagcatggttatgcgtaccaagcacgctgttaccgaagcatctccgatggttaaagcgaaagacgagcgccgtgagcgtcgcgatgatttcgcaaacgaaaccgctgatgatgctgaagctggggattctgaagagtaatttctgatgaccaaccgtctggtgttgtccggcaccgtgtgcaggactccccttcgaaaggtcagtccatcaggaattcctcactgccagttcgtgcttgagcatcgttctgtgcaggaggaagccggctttcaccggcaggcgtggtgccaaatgcccgttattgttagcggacacgaaaaccaggccattactcacagtataacggtcggcagtcgcataaccgttcaggggttcatttcatgccataaggcaaagaacggactgagcaaaatggttttgcatgccgagcagattgaattgatagattctggagactagccatatggcacgttatttccgtcgtcgcaagttctgccgtttcaccgcggaaggcgttcaagagatcgactataaagatatcgctacgctgaaaaactacatcaccgaaagcggtaagattgtcccaagccgtatcaccggtacccgtgcaaaataccagcgtcagctggctcgcgctatcaaacgcgctcgctacctgtccctgctgccgtacactgatcgccatcagtaatcggtcacggtccattaatacgactttgagaggataaggtaatgcaagttattctgcttgataaagtagcaaacctgggtagcctgggtgatcaggtaaacgttaaagcgggctatgctcgtaacttcctggtaccgcagggtaaagctgttccagctaccaagaaaaacattgaattcttcgaagcacgtcgcgctgaactggaagctaaactggctgaagttctggcagcagctaatgctcgcgctgagaaaatcaatgcactggaaactgttaccatcgcgtctaaagctggcgacgaaggtaaactgttcggttccatcggtactcgcgacatcgctgacgctgtaactgcagctggcgttgaagtggctaagagcgaagttcgtctgccgaacggcgttctgcgtaccactggcgaacacgaagtgagcttccaggttcacagcgaagtattcgcgaaagtgatcgtaaacgtagtagctgaataattcgttattcaacgagacgtaaaaacgccgaccagtggtcggcgttttgcttttaagcgataaaaaccgcagaaatagacgttccctccataaatctcttgctattccttttataaaaagttcgcagtacccatacctggcccccagcctcgccgctggtagttcgtgtcatgttttttacgcgtaaaacacgacaaaagcatcaatacagcgatcgtctcacttgtatgataataaaaacaatatgttatatatgaatgtgctgttattttattgtttttatatataaaaagataaaatatcatcactttcgtaatcttgaacgctttgcaggtgcgttcaatccaataaatgctaatattatggctatcatagccataaaaagataaaatattatcactatgggtaaaaaaacagcaccgttactcccttatacgaatcagatgcttagtgaatttggtgagcggctgaaacttgctcgtttacgacgcaggcttaccgcaaagcaagttgctgaacgtgctgggatgtcgccaataacattgcgctctctggagtcaggaagtgcaggggtcacgataggggcatatttgtctgtgatgcaggttttgggcctggaaacggatttaaataagcttgcagctgaagacgacttagggcgtcagctccaggattcccgtttgattaaaaaaagagggctttctcgtgcatcaagtaagaatgaagaaggttctcagacagcctcattgcagatgaggcacgagaaagaaggtcatctcaccacggatttaacagcactggcagaaggctcgacgccatctattacaggagaaacatcaacctctcttgcagcactattaaaaccgataaaaaaaccgttaaaaggaaattaattatggcattaatcggagtgtatgcggattgggaaggcctggatggtccggagcggattggttatttacacagtcgccgcactcggacgcgtgagatatttgagtttgagtacgataaaaaggcgcttgcagatccttcacttaatttcattcagttagatcctgaaataatgttgtatgagggagcacagtacccaattcctccaaaggataaatttggtgcatttagtgattcctgcccggatcgttgggggcgtatgctaatgaagcgtcgttttgagagggatattcgagacgggttatgtgataaagactcccacctttatgagtctgattatctactaggtgttcatgatctttatcgggttggggctcttcgatacaaacgtgaagacgctggagagtttcttgataatcgcattgatgttgcagccccaccatttaccgaaatagcgagtctggaaagggctagccgggcaattgaagaagatcctgataataaagagctaatggggcaaaaatggttaagaatgctaatcgctccggggggatcattaggggggggcacgtccgaaaaccagtgttgttgatgaagctgggcatctctacatcgctaaatttcccagtgtaaaagatgagtatgatgttggtggatgggaaatggtcgttaatgcacttgctgttggctgtggactgaatgttgcacctgctcaggcgcataaatttgccagcaattaccattgttttatggttcgtcgttttgaccgcactaatgcgggaaggcgtctgcattttgcttcggctatgacactaaccaggcatcaggatggtgaagatgcctctacaggtgtgagttatctggaattagcagatgttcttatcagacatggagcgcagactaatactgaccttaaggaactctggtccaggattgtttttaatattcttgtttctaataccgatgaccatttacgtaatcatggatatatcttgataccgggaaaaggttggcggctttctgaggcatatgatttgaatcctgttgccaggtctgacggtctaaaactcaatattacagaaaatgataatgcacttgatttggaattagctcgagaagttgcggagtattttcgacttggtttgacagaagcagatgacattattgctaattttagagggattgtcagtcagtggcgaatcattgccgagcgtcttcgattacctggtcgtgagcaagagttaatggcagaggcgttcaggggggcaatttagaatagttattttgatatattcgctaaatcataaatttgcgaagcaatgccagtagatactgaacgttttggaagagacgtttaatttatgagaaaaatagaaacgctacaaagctaaattatagcgtttctatgtaaaataattagcttgtcgctaactgtacttgtggttcttcgtctttaactttgataagcatccacagcgcaatggcgccaataatgtcaaagaaagccagggcaataaagaacggcgcgaagccaataatgtgaacgaatgccccgataaacaggttgaaaatcaactgaccgctccatgcacaggctcctgccatacccacagcggtagctacttcgtcttttttgaataggtcaccgcccagagttgctgcaacagtagaaagacattgatgcgagaatgcgccaatgctaatcagtaatacggcgatgtagggattttcgacaatactcaccagaccaatcgtcatcataatgacggctgcaatagtgaaggtaattcttcgtgagttaattaaactcacgccgcgatcgtggaagaacttcgcgacaaaaccactggctaaacagccgagatcgcccagcaggaaaggtagccagacgaacatggcaatttctttcaggctaaaatgcagcgtttcgacgaagaaaatcggtacccagaagttaatggttccccatgccgggtcagcgagaaaacgcgcgatgccaatcccccagaaattacgttggctgaggatatgcttgattgacgttttttctttcttatctgttttaagatgctgttcttgcccagactcaatatagtggcgctcttcatcagaaaggcgtttagcatcttttggatctttataacaaaagaaccaaaataaagccgcgagtaaagcaaggctacctgagacaataaacgcaaattgccagctatgaaacataatgcaccaggcaatcaacggtggagcaagcatcgcgccgagtgaggtgcccatattgaaaacacctgtcgccacgccacgctcttttgccgggaaccatgttgatgcggtttttacacccgcaggaattgccgatgcttcgctgaaacccatcagggcgcgcataaatgccagacctgaccatgttcctgtcaaggcatgccccattgtcgccaggccccagattgcggcacatatcgcaaaacttaacttcagacccacggtatcaataaagaagcccattatcggttgccccaatgtataggccaactggaatgcactgacaatccatgaatattgttctttggttattccggttgtctccataatcgttggagccgcaatacctaacgccgttctgtccagataattgattacagtgataaagcatacgagggcaatcatatgccatcgataattctttattttattcatttttaaaccttttaattatattaataaaccctggttgttggtatttccatgtaataggcaataaaaatcaggtacagaggaaatattggaaattattgtgtgtaaatgtctccctttaaaaagtctggccagtttttttcaaagtaaataccgttaatacacggttgcatacgtaaagactttacttcggtaataaaagaaccttgcgaatattgaattgttaatttgtgatttttgtcttcagcgagttcagagcgaaaacgccattcttcttttgcgccgcgacgagtttgtggtaggcatttgccttgtggatcaataaccatacgcgccccacggctaccaccaccagcatcaatataatgcgttaattgtgttaataccgcggcagaagtcagcgtcatatgccgccacataaacagctcggcaacttcacccacatgtttgattgccaatccatgtcgttggacaaattcgttcaatagcagggcatcacgagtggcacgtcggactttatcggcatggcaaataaatcccgcatagtcagacattcgtgcctgaattttttctctcacaaccgacaacggcatcccggacccgttatcgtgcgcctgagtaatgatctctcttatagaagccagtgccggagctgccagctgtgcaatatctccatcaatattccgcttttgcgtgcaaccaataaagcgcgccagacgaacagcaaaaacctgcccggcattcaacgccgcgccgccaggtcgggtgacgccgtgtgtgccagcaacttcccccaccgcaaaacaaccgggcagagatgtttgtccccagatatcgacttcaatgccgccattcatgtgctgattattcatggcaaactgcaatggctgcgtgatgagatcgtaaccgtgcatcttatacagcgagatagacagaggattcatttgttgcaggcgttcgatgggcgatggtgccagagcgtcgttattttccagatacgcgcgaacgtcgtcgtccagtcgatctaatgagaacggtaggtcacccggcacaggttctggattacgattgaaatccataaatacctgacgaccatgttgctgctcttgcgctactgccatatctaacaagctggagccaaaatccattacccgcgtggcgtggaacggccactgatagcctttacggaaaatgtttgaagccagctcctgggtggtgcgatagtaatccgcgaggaagttatactcgttgcccccggcatccacggaatagatatatgggatcacctgtacataggtgccggacaaattccacggaaacgtgctgcgcggtgtgcctataccaaactggctttcagtcagattcgttaacgtcagaccttcctccagcgccagccccagcgagccgaaacatttgtgtggatacacactgtcgcgataaagctcgccaggccctcctgttgccagtaccacattgggcgcagtcacaattgccagcccccatgggttatgggcgcgatgaccggtcgcgaggattgcccccgccacacggtcttcaccgttttcgtcacgctgatgcagcagtttaatcactgttgcactggccaacattgggatagcaagacgctgtacttcttccagcagcactttcaccattaaccttgaggtacgcggcccacacgaggttgcacgcccggcttcgtcatggtcggtttgataacgaagaatcgcgccatagcgatcttccggtaattccagaccaagatattgcaacccgccaagagtgtgcagagaacctaccgcttcgacataagcggtgtcgtgatccatcgccccaccgctcgccagtgcctctgccagtttggtgaagttgtcgccgttgcccgcggtagcggcggtaaacagtgtttgtttatcagagccagaacatgccgacgtccccatatataacccggcggtggcgattaacacattttgctggcggcgtttaagttccacagctgcacgtagccctgctgcaccactgccgactaccagggcatctgttttccagagtgggtaatcaacaccgtctaccgtgacaacccatgcgggttctgcctgtgcaaaaccctttgggaaagtaacgtgtgtcagtgcatcaaggatggcctcatcaagctggctcatgcatcctccatcggcgtaaacaggctactttccatcaggcgtgggtgcttgataattggacggaaggccatgaatggcagaatgtcgcgctcaatctctacgccaggggcgatctcaattaattcaacgccttctgccgttaactggaataccgcacgttcggtgatatacagcacttcctgaccgctttgctgtgcgtatgcggcgctaaaggtgattttttccaccagggtaaccagtttagggatttgacctgactgggcgatatgcaagccatctggcgttacatcaatcttgctgcctttggcgtcgaacgtaccgcaaaacaccactttacgggcgttttgtgcaatttcgagaaatccgccggggccaatgagattgccattaagatgggagacgttgacgttaccgtattgatccatctctcccatgccgaggaaggtgatatcgatgccgccgccactgtagaattcaaattgatcgagtgatggaataatggcatcggcgttacgggcgcagccgaacagagcatcatccagcatcatgccgttatgcacaccctgttctacactcagccacaaactttgataaggcacgccttcgcgcagcgcaaccccaggaataccgcccggaataccaaagccaaagttggttgaagcgcctgccaccagttcccgcgctgcccgacgggcaatcaggcgacgcaccggatgactaaccagttcaatagcgtcgttagaacttagacggcgatgttgaccgctgatggtcaggtcgtaaccgccaagataggtttgcggttgttcgcggtgctcaacgatgccatcgaccagaattcctggtagtttgacccgacgtggttcaatggtacctgcttccagcacatcgcggacctgtacgaacactttgccgccgctgttgtgtgctgccagcgccatcgaatagctatccatatcaatcgcctcttcttcgaggctgacgttgccacgcggatcggcataggtgccgcgcaaaatcgcgtagtccactttgaaagggcgataacgaagtttggtctcaccgtcgatttcaatcagttctaccaggtcgtcggtagtgcattcattcgacttaccgccaccattgcgtggatcaacaaacgatcccagcccaacgtgggtaaaaagccccggacgtccggcaccgatctcccgcagcagtgcctgaattacgccaccagggaaacagtaggcttcaatagcattgcttttcaccagttcctgcatcttgggcgaccaggtaaaatgtccggcaataatgcgtttgagcatttcggcgtgagcaaaacggttagtgcctttgctatcgcgatcgccaatacccagcgagtggattaatgtcagatcgcgcgggtgtccggtttgcagaaagcgcgcttcaatggcggccagaatatggtcagcttccaccatgccgccgccgttaccgctaatggcaatggttgcgccgtcctgaatttgcgccgccagtgtctcggcggttgataacttacgcatacaatttccttattgattgtggaagctcacgccggctttttcggcaaatgcgtgcgtcgcctgttggcaatcctgagtggcggacattaatccagccagtaactggtgggagtaatcggcgtgtttattttccagcgccagaatcagttgcttaatatgtgccagtgccaccggaccacatttttccagctgcgctaactggttcgccatccagctttccacctgttctttttctaccacttcatcaattaaattcgccgcctgagcttcctgcgccgtcaggcgtttacccagcatcagcatctggcgaccgaccaccgggccaacctgattaagcacgcgttcaatgcccatccagccaggcaccatgccgagcatcacttcaggattagagaattttgcgtgggggcgagcgatacgaatatcacagcacaaggcaagttcaataccgccaccgatggtatgaccgttgagattcgcaacggttaattggggtaagttgcgcaggcgattaaaaacgtcattaccgcgtttaatccattttctgcccatatctaatggcgaataggccgaccacgatttaatatcgccgcccgcacaaaagaatttatcgccggttgccgttaattcgactaagcgtaatgccgtgtcattttcaatttcatttaaataatggtcgagagattcgatcatttcttcattaatagcatgacatttatcttcacggttcaatgtcaggcggcaagaagccgccgctctgctgaacagaacgggttggtcactcatgattattccttaacaataatgtgcgatgcgatcgacgctaatatccagcgtgctgttaatatctttctgccaccagtacggtgagaatatttccagttcaatagcgccattaaatccggcgttttcaaccagccgacgaattgacggaatattgatgacaccatctcccggcattccacggtcattgaccagatcggtggtcggcactaaccagtcggaaacatgaaacgcgaggatgcgttttccggcacgcaggatctgactggcgagatccgggtcccaccagacatggtagacatctaccgccacgccgaggccaaattcgccatcgggatcgagttcatcacaccagtccagcgcctgacgtaacgtgcacaaacaggaacgatcggctgcggtcatcgggtgtagcggctccagcgcaatcggcacgccgacctctttcgaatgtggcagtaactggcgaatcccttgtttcacttgttcccgcgcttcatacagatcttttgttcccattggcagaccgccaaccacctgcatataacaggcggcgttcagtacagcggcgtcgtccagcgcccggcggttatcgtcaatcgccagtttgcgctccgccagcgtcggtgcggtgtagtaggtgctacggcacaaaccggaaacgtttatgttactggcagcaagctggcgggcgatttgctggagatcttcaccctgcaactccctgcgccagggggcaatggcgccaataccgcgtgcggcgcaggcatcaataatggcgggcagcggcgttttatagcccagtgtcgcggtattgatactgaataaatccgggcgttgtaacagatctctcatgattcagcctcagaagcgcggcatacttaagccgccgtcgatggcgaccgcctgaccacaggtgtaaatcagtttaccttccgccatcgcgcggacagtggaagcaatatcagccggataaccccaacgtccccacggcaccagacctttggcaatcagttcgtcgtaataggccgttgccggaatagtcatatcggttttgatgagaccaggacgcacttcataaacgccaatttgttcattacaaaggcgagcagcaaacagacgagcagcggcagagacggcagttttggcaatggtatattcgccgcgattcatcgccagcatgatggcgttgatggaactgacgaaaataatcgagcggtgcggcagttctgcttccggtttcggctgtgccagtaagcgcttactgaatgcctgagcgaggaagaacggtgcgcgggtgttaatggcaatattttggtcgaagctgtctggttcgaggtcgagaaggtcaccgcgttttttcactgaaatgcctgcgttgttgagcaggcagtccagacgtccccactggttttgcgctgcgtcgagcatctcttcatgcagggagagatcgcccacatcagcagggaagcaaatcacttccacgccttccgccagacattcttgttgtgtggcatgtaatttttctacgctatccgcatccggacgatcattaatcagcagattaaatccgccacgcgcaagctccagcgcacagccctttccaataccacgtgcggctccggtaatcacggcaacaggacgagtggatttcatacaatagctctctttttttgaattttgtttccttagtgatgattagcttgcgactggaggataaaaagatcaaccatctagttggttgatatgcgatggcgatcacaggacatttgataacctgatgaaagtacaagtttttgcccttttttctgaagctgaaatcaaatcaggttatgatagtcaccacgaagaggtcgtggggaagcgttatgtatcttgataccagcaacgtacagagcctgaaagaaaagctgctgttatgcgcggttaatgaatttgccgaatatggttacgaaggggccagagtcgataatatcgtcaaggccgcggggtgcagtaaacaaacggtttatcaccactttggtaataaagaaaatttatttatcgaagtactggaatatacctggaacgatattcgacaaaaagaaaaggcccttgatttctcagatcttccgccacagaaagccattgagaaaataatcgattttacatgggattattatatttctaatccctggtttttaaaaattgtgcatagtgaaaatcaaagtaagggtgtgcattatgcaaaatcacagcgtcttttagaaattaaccatgcgcacttgcagttaatggaatccttattggatgaagggaagaaacaaaatatttttaagccagatatcgacccattgcaggtgaatattaatattgctgcgcttgggggatattatttgatcaaccagcatacgcttggcctggtttatcacatcagtatggtttcaccccaggcactggaagccagacgtaaggtcatcaaagagacaatccttagctggcttttggttgacccttcatctaccgcgcgcgaataaaactgccatccggctggcgggtaaacaggacctgttgattattccccgtatcaatggttaagcccgtcaccacgccgctggcgttctggcggattttcaccatctgcccgttttgcaaattactcagtggcttatccgcgccttctacctgcgccatggcatagacatcggtagcgggcagtccgtggtcgcggaacagctgcgccatcgttttaccgggttcgacacgataggagcgccattgattatcaattccgctatctggctggaatggttgcgtatgggtggtttgcggctgctcttctggttggccttcctgtattggttctggagcgaccggagccacctgatcaggatcattttgtggcgtgactaattgcgcccgcagctgttcttctgtcggtggttgtgattgcgactgaatatctaactgcgcttcacgcgtcaccaccggcgcgttgggcgtatcatcagatggaagcagaaatccgactaccaatacaatggcggcaataatgatcccccgacgatgcatcggcggcagcgggtccatgaagcgaaaattgtccggcgcgtgccagactttctccagggttggttttagttcaaagcgcccgggcatggtttcctcctgctccgcgtcttgttcctcaatcatagcctatgaataagctaacgctatgatgtccgtggtaaacccgcctttattatattcatacgggatattgctattgtttctttttccccgggatttgtcatcattcccgcgacaaagttttacccaaagaagtgtggctgatatgctgcccgctactttataccctaagaaaggaaatacgatgaccaccccaacttttgacaccatcgaagcgcaagcaagctacggcattggtttgcaggtagggcaacaactgagtgaatctggcctggaagggctgctgccagaagcactggttgcaggcattgccgatgcgctggaaggcaaacatccggctgttccggttgatgtggtgcaccgcgcgctgcgtgaaatccacgaacgcgccgatgccgttcgtcgtcagcgtttccagacgatggctgctgaaggtgtgaaatacctggaagaaaacgccaaaaaagaaggtgtaaatagcaccgaatctggcctgcaattccgcgtgatcaaccagggcgaaggcgcaattccggcacgtaccgaccgcgttcgtgttcattacaccggaaaactgatcgacggcaccgtgtttgacagctccgttgctcgcggcgagccagctgaattcccggttaacggcgtgatccctggctggattgaagcactgactctgatgccagtaggttctaaatgggaactgactatcccgcaggaactggcatatggcgagcgtggcgcaggcgcgtccatccctccgttcagcaccctggtgtttgaagtcgaactgctggaaatcctctaagcagcgcattctgttcccctcgaaccagaggggagcaggcattcagcaataaacccttcagtttgccaaacggcgctattttatgttgcaaagaccctgtaagcgtgtatttttgtgagctgtttcgcgttatcaccgtgatatgacactcactttaaacataaaattaacattagatctaaatcttagtattcatcccgcgtattgttacctaatatcgatgagtcccgatacagattcgtcgtatcatagactgactaaaggccgtagagcctgaacaacacagacaggtacaggaagaaaaaaaacatggtagatcaggtaaaagtcgttgccgatgatcaggctccggctgaacagtcgctacggcgcaatctcacaaaccgacatattcagcttattgccattggcggtgccattggtacagggctgtttatggggtccggcaaaacgattagccttgccgggccgtcgatcattttcgtttatatgatcatcggttttatgctctttttcgtgatgcgggcaatgggggaattgctgctttcgaatctggaatacaaatcttttagtgacttcgcttccgatttactcgggccgtgggcaggatatttcaccggctggacttactggttctgctgggttgtaaccggtatggcagacgtggttgccattaccgcctatgcgcaattctggttccctgggctttctgactgggttgcttcgttatccgtgatcattctgttactggttctaaacctcgccacggtaaaaatgttcggtgagatggagttctggtttgcgatgatcaaaatcgtcgccatcgtgtcgctgattgttgtcggcctggtcatggtggcgatgcactttcagtcaccgaccggtgtggaagcatcatttgcacatttgtggaatgacggcggctggttcccgaaaggcttaagcggcttctttgccggattccagatagcggttttcgctttcgtggggattgagctggtaggtacaacagctgcggaaaccaaagatccggagaaatcactgccacgcgcgattaactccattccgatccgtatcattatgttctacgtcttctcgctgattgtgattatgtccgtgacgccgtggagttcggtagtcccggagaaaagcccgttcgttgaactgtttgtgttggtaggtttgcctgcggctgccagcgtgatcaactttgtggtgctgacctctgcggcgtcttccgctaacagcggtgtcttctctaccagccgtatgctgtttggcctggcccaggaaggtgtggcaccgaaagcgttcgctaaactctctaagcgcgcagtacccgcgaaagggctgaccttctcttgtatctgtctgctcggcggcgtggtgatgttgtatgtgaatcccagcgtgattggcgcgttcacgatgattacaaccgtttccgcgattctgtttatgtttgtctggacgattatcctttgctcgtacctggtgtatcgcaaacagcgtcctcatctgcatgagaagtcgatctacaagatgccactcggcaagctgatgtgctgggtatgtatggcgttctttgtgtttgttctggtgttgttgacactggaagatgacacccgccaggcgctgctggttaccccgctgtggtttatcgcgctggggctgggctggctgtttattggtaagaaacgggctgctgaactgcggaaataatcgcattatcatgctggatggcgcaatgccatccagcttttagatcactcacccgccagcgcgcgcgggaatagtacattgttttccagactgatgtgctccatcaggtcatcaatcagttcattaatgccgttatacatcgctttccaggtggtgcaggcttccggcggcggtgtgacgttattggtggtgtgtttgatcacttccagcagttcgcccgcttcatcgtgctcgctttccattacgctgattggccccattgcctggctgcccatgccttgtttaatcatcgggaagagaatttgctcttctttcatcatgtggctggaaagctcttcatgcagcatagtcaggtattttgtcagcccttttggcacacttggtttgtcggcgtgaacgcgctcgactttagtcgcttgcaggatcagctccggcagctgctcgcgatggcgatcgtgatagcgcacaataatgtggtcgatgatttccgccagcggggcgctacgccagtctttctcaatcggttgttcagcaagctttgccagttcggcttcaatgacgtcaacatccagttctttacgtgccgccgcgcgcgccagcgtctgcttaccgccacagcagtaatccatatcatatttacgaaacagagccgaagcgcgaggaatagagagcgccagttcacctaaaggttggtcgcgataagccatagctgatacctcattcttaataagataagatgcattttaaatgcatctttaaggcaaaagctataacccttacgtagcagaggcttatttaactcactgccagcgtgtcaactttctgagacagattcagttaaaggtttttctggttttgctctgaccgcgatgaccacgccaatcactaacagcgcgataccgctcagcgtcattagcggcggcatttgctggcggagtaaaaaggtgtacagcaaacctgccagcgtttcgaaaacaatcagcggcccgagaatcactgtcggtaatcgctggctggcgacgttccagcagagtgcgccaacccatgagcaaagcacggctatcgcaaccatcagactaataaacaccagcggacgggggccaaagggtaaggagaagtccggcgtttgcatattcagccagtaacaggcgacgagatagccgatgagagaaaccggcagcgtgaccagcgcctgcgccgtcgcccacatcatcggatgtttgtcgggattttcccgcagccagcgggcgttgcgcagggcataccatgcccagcagaccacggaaactaacgctagcacgatgcctgaggtataacgtgcccagtcaaaatcggggagtccgtggtttaactcagcaatattcacacacgccaggccgatgccaatacaaaccagtgccggggcgagttttccccatgcgagtttgccgtcgcgctggctataaagcagattggcaaaaacgggaatcaccaccggcagggtgccgataatcatcgtggaaacaggcgcgccagtacgttgaatggcacttgcaaggcagaagtaatagataaggttgcccatcatggtgagcatcaaggcggtaagccagtcgcgacgcgccaactgacgcagacgcacgcgtcccagccaggcaatgggcagcgcaattaaccctaacgccagataacgccccatcgactgcaacatcgccgggtattccggtacgatcaacggcccgacaaaaataagcccccacatcaaccctgctaacagggcgtacagcacgccgctaatcattactggcatccattggtctgtcagaagaaagttcaggaagcagacatgattgctcccggcatcccgtcattatcagagaggatgcgggaggatgccactttaattaactagttattaacattaaaaagatggcttacgctttcggctaacgttgtcgttgggcggccaatcaatttgctaagcgttttgctgtcatcaaacagaccgcctttcgatgcgccaacgtcagaatccgccagcatatccgccagtccatcaggcagaccgacgcttttcagcgccgcggcgaaatcagcttcgctcaggttttgataggtaatcggtttgccgctctgtttggtgagttctgccgctaactgtgtcagcgtccaggcactatcgcccgccagttcgtaaaccttgccttcgtgaccggcttcgctaatcacgcgtgccgcagctaccgcataatcagcccgcgttgctgaggcaattttgccatcgcccgcggcaccgataaatacgccgtgttccagtgctgccggggcgctggcgaggtagttttcactgtaccagccgttgcgcagcagggtgtaaacgatgccagaatcagccagcattttctccgtctcgatgtgctcatcggcgaggccgagcggggaggaatcggcatgtagcaggctggtataagcgataaatttcacgtcggccgcctttgcggcattaataacattacgatgctgcggggcacgttgacccacttcgctggaagagatcagcagtagtttttccactccctgaagcgcagatgtcagtgctgcttcatcgccgtagtcagcctgacgcacggtaatgccttgtgctgtcagtgcctgtgcttttgccggattacgaacgatagccactatttggctggcaggaaccgttttcatcaaggattcaataacatagtgaccaagttggccagtggcaccagtaatagcgatcatgggaagtctccatcgttttgtcttgtgtttaaatacgctaacacctaaacttacttttagtaagtacgtacaaaaaggtaagtatgaaatgagtcaggttagcctgtcgcaacaactgaaagagggaaatctctttgcggaacagtgcccgtcgcgcgaggttttgaaacacgtcaccagccgttggggggtgttgattctggtggcgctacgcgaaggtactcatcgctttagcgacctgcggcgcaaaatgggcggggtgagtgaaaagatgcttgcgcagtcgttacaggcattagaacaggatggttttcttaaccgtatcgcgtatccggtggtgccgccgcatgtggaatatagcctcacgccgctgggcgagcaggtgagcgaaaaggttgctgcactggcggactggattgagttgaatttgcccgaggtgttagcggtgcgggatgaacgtgcggcataactgccggatgcgctgcgcttatccggactacggttcatggcttgtagggcggataagatgcgtcagcatcgcatccgccaataaatgccggatgcggttgatgatttgtaggccgaaaaagaagtgttttacttactcagatccacctgataaatcgcaaacccgatatcatcggtcgcgactttattcatcggatactgccctttctctttaataaacactgcggctttatctgacggagaggtttcgaaacggatatccagtttcttatcgccagctattggtgctaaacgccagttgttatctgccgccgggtgaatttcccccgcacgtttcgactcatcagcaatccacgctgccagcaccgagcggttctcatccggtgaagcaaaagcgatatggctgtcgcccgtaccggcaaatttgccgccgtaagcgcgatagttattggtggcaacgaggaacatggcgttcggatcaatcggcttgccgttaaaggtcaggttcttaatcctttccgcattggcattaatcatctggcactcgccgtcataacgggcgggctgggtaacatcaatctgataattcacaccatcaataacatcaaagttataggtgcggaaaccatcccagttgatgagtgactgtggtttcgtgctgttaggatcaatctggttaaactgtccggcggagcactccagccactctttcacctctttaccgctggctttcaccacaatcagcgtattggggtagagataaagatcggcggcattacggaaggtcaactggcctttttccacctccacatagcttgcggggtcatttttgcgaccaccaactttaaacggtgcggcagctgaaagcactggcagttttgccagatccggatcgccctgaatgtaatgctcgacatacgctttttgcgcgttgttcaccacctgcacggtcggatcgtcctgcacaagcgccagatagctatacatattgtcggcagatttaccgattggcttgctgacgaactggcgtgtggcatcgtgatcggctttgagtgtttctaccagcttgctgtcttccgccgcgagggattttttattcgcgatgtcgtaaatcggccgtgcttccgctttcgcctgcgtcacctgccatttaccgctgtcattactgagttgtaagtcgaccacaccaagatgatcgccccacatgcctggcattaccgccggaacaccattcagcgtgcctttcgcgatatcagccccttcgatatcagcaaaatctttacctgggaaaacggcgtgagcatggccaaacataatggcgttaacgcccggaatttcactgaggtaataaactgagttttccgccatcactttatacggatcggcagacagcccggaatgcgccagaacgacaacgacatcggcacctttctcgcgcatttcaggcacgtatttgcgcacggtttcggtaatatcattcaccgtcactttcccggataaattagctttatcccagcccatgatttgtggcgggacgacgccaatataaccaatcttcagcgtctgtttttttccgtctttatcgaccacttcggtgtctttaattaaatacggtgtaaacattggctgtttggttctggcgtcaatgacgttggcatttacataagggaatttcgctcccgccagcgcatttttcagataatccagaccgtagttaaactcgtggttgccaagcgtgccgacggtatagtccagcgtatttaatgccttatagaccgggtgaatatcacctgcttttaatcctttcgccgacatgtaatctgccagcggactcccctgaatcaaatcgccgttatcgaccagtacgctgtttttcacttcattgcgggcatcgttaatcaggcttgccgtacgtaccagtccgaatttttccgtggcggtgtctttgtaataatcgaaatccatcatgttgctatgcagatcagtggtttccatgatacgcagatcgaccgtcgctgcattcacactggcggcaatcagcgtggccaggagcgttgcgctaaacttaatcatcagggacatccttttatcatcgggaatacgaaagaaaagggagaataaacgtcttacttatagaacagtgaagaatgccacaattttacgctttgaaaatgatgacactatcacagttggcgcattcattaacgatagggtataagtaaaacaataagttaacaccgctcacagagacgaggtggagaaatgttagatcaagtatgccagcttgcacggaatgcaggcgatgccattatgcaggtctacgacgggacgaaaccgatggacgtcgtcagcaaagcggacaattctccggtaacggcagcggatattgccgctcacaccgttatcatggacggtttacgtacgctgacaccggatattccggtcctttctgaagaagatcctcccggttgggaagtccgtcagcactggcagcgttactggctggtagacccgctggatggtactaaagagtttattaaacgtaatggcgaattcaccgttaacattgcgctcatcgaccacggtaaaccgattttaggtgtggtgtatgcgccggtaatgaacgtaatgtacagcgcggcagaaggcaaagcctggaaagaagagtgcggtgtgcgcaagcagattcaggtccgcgatgcgcgcccgccgctggtggtgatcagccgttcccatgcagatgcggagctgaaagagtatctgcaacagcttggcgaacatcagaccacgtccatcggctcttcgctgaaattctgcctggtggcggaaggacaggcgcagctgtacccgcgtttcgggccaacgaatatttgggataccgccgctggtcatgctgtggctgcagctgccggagcgcacgttcacgactggcagggtaaaccgctggattacactccgcgcgagtcgttcctgaatccggggttcagagtgtctatttattaattaatttatgcagcaggtccatcacttgctgcacctcttcctgagtaagtgccccgtctttggcccattgcacgcgaccgtctttatccagcaccactacagcggaacttttttcatccagctgccaggcaccgcgtgcgacgccattgctatcaacaataaactgcgaccagggataaagctttttattactctccagactgctgcgcacaaacatccctgaacccggaatcgcgtcgtcggtgttaacaatggtggtggtctggtaacgatcgtgcggtaacttcgctgatttaatcgcttcaatcagcgtcgcgtttttctcttttgcagaggtgcgaccagcaatatgttgcagtactcgcacttttcccactaactgcgcgctgttccaggttttgtagctaaactgatctttatcaagcaccaactcgccacgatcggtgatgccaatcggcggcactcgctgaccggtttcgaactgatgtgcggaagccatcatcggcaacagcaggcaggtgagtgccagaatcttgcgtagggtcatggtgtttccttcttatgatatgcaggtgatccgaccacttgggtctgagttttaatcatatgtgctatttatcgaatttcccgcaagtgtgatgccagtttgcggtcaagcgcacaaatcatatgaaaaatgaatgcttatactgaagaccgcgcttcggtaaaaagataattctgaataattgtaacctttaggtaaaaaaagttatacgcggtggaaacattgcccggatagtctatagtcactaggcattaaaatttgcgcctcataatagttgggccgattgtggcaccgcaaaggcgtaatactcagcaggagataacaatgaaaattttccaacggtacaacccacttcaggtggcgaagtacgtaaagatcctgttccgtggacggttatacatcaaggacgttggcgcttttgaatttgataagggtaagattcttatcccaaaagtgaaggataagctgcatttgtcagtgatgtccgaagttaaccgtcaggttatgcgtctgcaaacagagatggcttaaccaaagtgctatgcagtaaaaagtgctatgcagtaataagacggctcctgattcaggagccgttgatgtttctggggttatgcgacgctttcttctttatctttagcgtcaggcagttttggcgaaagggcggtggctttgctgtcgattcgggtcaccagcagctggtcgatgcggtagttatcgatatccaccacttcaaatttgtagccggcgaatttcaccgaatcggtgcgtttcgggatcttacgcagcataaacatcataaagccgccgatggtttcgtagttgcccgactgcgggaactcgtcaatatccagcacgcgcatgacgtcgtcaataggcgtgccgccgtctatcagccatgagttctcatcacgggcgacaatttgctcttccagcccctggccgaccagatcgcccatcagcgtggtcatcacgtcgttgagggtgatgatccccactaccagcgcgtactcgttcatgatcaccgcgaagtcttcacctgcggttttaaaactttccaacgcctctgaaagggttaacgtatccggcacaatcagcgtgttgcgaatttgtacgccgctgttcagtgccaggctttggttagccagcacgcggttcagcaggtctttagaatcgacatagccgatgatgtggtcaatatcttcattacagacgagaaacttagagtgcggatgttccgccactttattcttcagactttgctcatcttcgtggagatcaaaccaaatcacgttttcacgcggtgtcattgaagacggaacggtacgggattccagctcaaagacgttttcaatcagctcgtgttcctgtttacgtaacacgcccgccagcgcaccggcttccactaccgcgtagatatcatcagaagtgatgtcatctttacgtaccattggcagtttgaaaatacggaagattatgttcgccagtccgttgaagaaccacaccagcggggtgcaaacgtacaggcagaagcgcatcgggttgatgatacgcaaagccacagcttctggcgcaatcataccgatgcgtttcggggttaaatccgcaaacaggataaacatgccagtcactaacgagaaagagagaataaagctcagttgctcagagagttctgccgacatatagcgggagaacaggctgtgaaaagctggagaaaatgccgcatcaccgacgataccgccgagaatcgccactgcgttcagaccgatctggaccacggtaaagaacatgccgggattttcctgcatattcagaacgcgttgggcatttatattgccttcatcagccagcagtttaagtttgattttgcgtgaggcggcaagcgagatctcggacatcgagaagaacgcacttacagcgatcaaacagagtatgactaaaatactgtttaacatatcttatccgacctttcaggccagatcctcggaaggggaagttgattaatttgtgtgaaatacacattgaaagccgattcgaagaaagtgaaccggcattttcagtggctagtatagcgtaaggtactgtaaagccgccagagggttaaaattcagacagctgaaaaatgaaaaactgcctgatgcgctatgccgaacaggcctacgcagtccccgcaatatattgaatttggacgattttgtaggcctggcaaggcgtttacgccgtatccggcataaacaaaatgcactttatcaacaatctacatttgtacccgtaacgctatgcttccggcggcagacagacgccaattccgccaattccacagtaaccatacgggtttttatgcagatattgctggtggtcatcttcggcataataaaacggtgtggcgttagcgatttccgtggtgatgcgacgatcgtcatcggcggcaagcatcgccgcctgaaaacgttccagactggcgcgagcggcggcatcctgttctggggtcagcggataaatcgctgaacgatactgcgtgccgtggtcattgccctgacgcattccctgggcgggatcgtgattctcccaaaatacttgtagcaactgctcatagctgatgacggatggatcgtaaacaatgcgcaccgcttcggcatggccagtatcgccggagcacacttcccgataagtcggatttggcgtatagccgccggtatagactgcggcggtgctgtaaacgccgggtaactgccagaacagacgctccacaccccagaaacaacccatcgcaaaaatggcaatctccattccgtcaggtacattggtcattgagtgaccgttgaccgcatgcagtgtggctacgggcatcggggtgttacgtccaggcagggcatcggcgggggaaaccagatgctttttatcaaataaactcatggtgtcgctctcccgaaaatcggtcattggggttaaggttgtaacaagaggcgtatttgcacacaataaccaccgtgaataggtctaaagtaaaacataagaaatattttgggtttagtctgctttttaatccatattactggatttttgttaagccgtttaacggcgttccaggggcaggaaaaaaggatattcaggagaaaatgtgcgctatatccaacagttatgctgtgtaagcttactctgcttaagcggatctgccgtcgccgcgaacgtccgtctacaggtcgaggggttatcgggacagctggaaaagaacgttcgcgcgcagctttctacgattgaaagtgatgaagtgacgccagaccgtcgctttcgcgcacgcgtcgatgatgccatccgcgaaggtctgaaagcgctgggctattaccagccgaccattgaatttgatctccgtccaccgccaaagaaagggcggcaggtattgatcgccaaagtcacgccaggcgtgccggtgttaattggcggcaccgatgtggtattgcgcggcggcgcgcggaccgataaagactatttgaaattgctcgatactcgcccggctattggtacggtactgaaccagggcgattatgaaaatttcaaaaagtccttaaccagcattgcgttgcgtaaaggttatttcgatagcgaatttaccaaagcgcagctgggcattgcgctcggcctgcataaagccttctgggatattgattataacagtggcgaacgttaccgctttgggcatgtgacctttgaaggatcacaaatccgcgatgaatacctgcaaaatctggtgccgtttaaagagggcgatgagtacgaatcgaaagatctggcagaactgaaccgtcgactttctgctaccggctggtttaactcggtggtggtggctccacaatttgataaagcgcgcgaaacgaaagtattaccattgacgggcgtggtttcgccgcgaacagaaaacaccatcgaaactggcgtcggttactctacggacgtgggaccgcgcgtgaaagcgacgtggaaaaagccgtggatgaactcttacggtcacagtttgaccaccagtaccagtatttccgcgccggaacagatcctcgacttcagctataaaatgccgctgctgaagaatccgctggaacaatattatttggtgcagggcggttttaagcgcactgacctgaacgataccgagtctgactccactacgctggtggcttctcgctactgggatctctccagcggctggcagcgtgccattaacctgcgctggagtttcgaccactttacccagggtgaaattaccaacaccacgatgctgttttatcctggggtgatgattagccgcacgcgttctcgtggtggcctgatgccaacctggggcgactcgcaacgctactctatcgactactccaacacggcctggggctcggatgttgatttctccgttttccaggcgcagaacgtctggatccgcacactgtacgatcgccatcgttttgtgacacgcggcacgctgggctggattgaaacgggtgatttcgacaaagtaccgccggatctgcgtttcttcgccggtggcgatcgcagtattcgcggctacaaatacaaatctatcgctccgaaatacgccaacggtgacctgaaaggggcctcgaagctgataaccggatcgctggaataccagtacaacgtgaccggaaaatggtggggcgcggtgtttgtcgatagcggcgaagcggtaagcgatattcgccgcagcgactttaaaaccggtaccggggtcggcgtgcgctgggaatcgccggtcgggccaatcaaactcgattttgccgtaccggtcgcggataaagacgaacacgggttacagttttacatcggtctggggccagaattatgagtttatggaaaaaaatcagcctcggcgtggttatcgttatcttactgttgctgggatcggtggcgtttctggtgggcaccaccagcggcctgcatctggtatttaaagcggcggatcgctgggtgccaggactggatattggcaaggtcaccggcggctggcgtgatctcaccttgtctgacgttcgttatgagcagccaggcgtggcggtaaaagcgggcaatctgcatctggcggtcgggcttgagtgcctgtggaacagtagcgtttgtattaatgatctggcgctgaaagacattcaggtcaacatcgacagtaaaaaaatgcctccttctgaacaggttgaagaagaggaagatagcggtccgctggatctctccacgccgtatcccattaccctgacacgggtggcgctggacaacgtcaacgtcaagattgatgacaccacggtatcggtgatggacttcacctccggcctgaactggcaggagaaaaccctgaccctgaaaccgacatcgctgaaaggcctgttgattgctttgccgaaagtggcggaagcggcacaggaagaagtggtcgaaccgaaaattgaaaatccgcagccggaggaaaagccgctcggcgaaacgctgaaagatctcttttctcgcccggtattgccggaaatgaccgacgtgcatttgccgcttaacctgaacattgaagagtttaagggcgagcagctgcgcgtgacgggcgacacggacatcaccgtgagcaccatgctgctgaaagtgagcagcattgacggcaatactaaactggacgccctggatatcgactccagtcaagggatcgtcaacgccagcggcacggcgcagctgtcagacaactggccggtggatatcaccctcaacagcacactgaacgtggagccgttgaaaggtgaaaaggtgaagctgaaagtgggcggtgcgctgcgcgaacaggtggagattggcgttaacctttccggtccggtggatatggatttacgcgcccagacgcgactggcagaagctggattgccgctcaacgtggaagtgaacagcaaacagctttactggccgttcactggtgagaagcagtatcaggcggatgatctgaaactgaaacttaccggcaaaatgaccgattacacgctctctatgcgcacggctgttaagggccaggagatcccgccagccaccattacccttgatgccaaaggtaatgaacagcaggtcaatctcgacaaacttaccgtcgcggcgctggaagggaaaacggaacttaaggcgttgctcgactggcagcaggccattagttggcgcggtgagctaacgcttaacggcattaacaccgccaaagagatcccggagtggccgtcgaaactcaatggcttgattaaaacccgcggtagcctgtacggcggcacctggcagatggaggtgccagaactgaagctgaccggtaacgtcaaacagaacaaagtgaacgttgacggcacgctgaaaggcaacagttatatgcagtggatgatcccagggctgcatctggaactggggccaaacagtgccgaagtgaaaggcgagctgggggtaaaagatctcaatcttgatgccaccatcaacgcgccggggctggataacgcgctgccggggcttggcggtacagcgaaagggctggtgaaagtacgcggcacggtggaagcgccacaactactggcagatatcaccgcgcgcggcctgcgctggcaggaactttccgtggcgcaggttcgcgtggaaggcgacattaaatccaccgatcagatcgccgggaaactcgacgtacgcgttgagcaaatttcgcaaccggatgtaaatatcaacctcgtcaccctgaatgccaaaggcagtgaaaagcagcacgagctacagttgcggattcagggcgagcctgtctccgggcagcttaatctggcaggaagttttgatcgcaaagaagaacgctggaagggaactcttagcaatacccgcttccagacgccggtcggcccgtggtcgctgacccgcgatattgcgctggattaccgcaataaggagcaaaaaatcagcatcgggccacactgctggcttaacccgaatgcggaactgtgcgtgccgcaaactatcgatgcgggtgccgaagggcgtgcggtggtgaatctcaaccgcttcgacctggccatgctgaaaccatttatgccagaaaccactcaggccagcggtctcttcacgggtaaagcggacgttgcctgggacaccacgaaagaggggctgccgcagggcagtatcactctttcggggcgtaatgtgcaggtgacgcaaaccgtcaacgatgcggcgctgcccgtggcgtttcagacgctgaatctgacggcggagttgcgtaacaaccgtgccgaattgggctggaccatccgcctgaccaataacggccagtttgatggtcaggtgcaggtgaccgatccgcaaggccgccgtaatcttggtggcaacgtcaatatccgtaacttcaaccttgcgatgataaaccccatctttacccgtggggaaaaagccgcggggatggtgagtgccaacttgcgtctgggtggtgatgtgcaaagcccgcagttgtttggtcagcttcaggttacgggggtggatatcgacggcaactttatgccgtttgatatgcaaccgagccagcttgcggtcaactttaacggtatgcgctcgacgcttgcaggtaccgtgcggacccagcagggtgaaatctacctgaacggtgatgccgactggagccagattgaaaactggcgggcgcgggtaacagcgaagggcagtaaagtgcgtatcaccgtgccgccgatggtacgaatggatgtatcgccagatgttgtattcgaggctacaccaaacctgtttaccctcgatggtcgcgtggatgttccgtgggcgcgcatcgtggtgcacgatctgccggaaagcgcagtaggcgtttccagcgatgtggtgatgcttaacgataacctgcaaccggaagagccgaaaacggcgtcgattccgattaacagtaacctgactgtccacgttggcaacaatgtgcgcattgacgcctttggcctgaaagcgcggctgacgggcgatctcaacgtcgttcaggacaaacaagggctgggcctgaacgggcagatcaacatccctgaagggcgcttccatgcctatggtcaggatctgattgtgcgtaagggtgagctactgttctctggtccgccagatcaaccgtatcttaatatcgaagctattcgtaacccggatgctacagaagacgacgtcatcgccggagttcgcgtcactggtctggcggacgaaccgaaagcggagatcttctctgacccggcgatgtcgcaacaagctgcattgtcttatttgctacgtggacaagggctggagagcgatcagagcgacagcgcggcgatgacctcgatgctgattggcctgggggttgcgcaaagtggccagattgtgggtaaaatcggcgagacgtttggcgtaagcaatttagcgctcgacaccgagggagttggcgactcctcccaggtggtggtcagcggctatgtattgccaggcctgcaagtgaaatacggcgtgggtatatttgactctatagcaacactcacgttacgttatcgcctgatgcctaagctatatctggaagccgtgtctggtgtagaccaggcactggatttgctctatcagttcgagttttagcaatgcgaatatttgtctacggcagtttacgccacaaacaaggcaacagtcactggatgaccaatgcccagttactgggcgatttcagtattgataactaccagttgtatagcctgggccactatccaggcgcagttccggggaacggaacagtacatggtgaagtttatcgtattgacaacgccacgctggccgaacttgatgccttgcgcaccaggggcggtgaatacgcgcgccagttgattcagacgccgtacgggagtgcatggatgtacgtttatcaacgacccgtcgatggattaaagctaattgaaagcggcgactggttagacagggataagtaataataaaagcacgccaccttcgggtggcgttgttttatccaccagcctgaatatattccgaatttgacgccattcttatcttttcttaaatgctgatttgttgcgcagtgttataaacacctggcacgctcaacaaggacgcgaccacaatgaaaaaatctcttctggctgtaatgctgacaggactgtttgctctcgtttctcttcccgctctgggaaatgtcaatctcgaacaattaaagcaaaaagctgaaagtggagaagctaaagcacagttggagctgggatatcgctattttcagggtaatgaaacgacaaaggatctcacccaggcgatggactggtttcgccgtgccgcagagcagggatacaccccggcagaatatgtactggggttacgctatatgaacggtgaaggtgtgccgcaagattatgctcaggcagttatctggtacaaaaaagcggcactgaaggggcttccgcaagcgcagcagaatctgggtgtaatgtaccatgaaggtaatggcgtgaaggttgataaagccgaatctgtgaaatggtttcgcctggcagcagagcaaggtcgtgacagcggccagcaaagtatgggagacgcatattttgaaggcgatggtgtgacgcgggattacgttatggcacgtgagtggtatagcaaagcagcggaacaaggtaacgtctggtcctgtaaccagcttggttatatgtattccagaggtttaggcgttgaaagaaacgatgccatatcggcacaatggtatcgaaaatcagcgacatcaggcgacgagttggggcagcttcatttagccgatatgtactatttcggtatcggtgttactcaggattacactcagtcacgggtattattttcccagtcggcagagcagggaaattctattgcgcagtttcgtctgggatatatattggagcaaggtttagcgggagcgaaagagccgttaaaagcactggagtggtaccgtaaatcggcagaacagggaaattccgatggtcagtattatttggctcatctgtatgataaaggcgcagaaggtgtagcaaaaaatcgagaacaagccatctcctggtacacgaaatcggcagaacagggggatgctaccgcacaggctaatctcggcgctatttacttcagacttggttcagaagaagaacataaaaaggcggtggaatggtttcgcaaggccgccgcaaagggtgagaaagcggcgcaatttaatttgggtaatgctttactccagggaaaaggtgttaaaaaagatgagcaacaggccgcaatctggatgcgaaaagccgcagagcaaggattaagtgcagcgcaggtacaattaggtgaaatctattattatggcttgggcgtagaacgtgattatgtgcaggcctgggcgtggttcgataccgcatcgaccaatgatatgaatctttttggtacagaaaaccgcaacattacagagaaaaaactgacagccaaacaactgcaacaggctgaattattatcgcaacaatatatagaaaaatatgccccggaagcctgggcgagaatgcaaaagcttaaagcgcaatcagcggtaaagacgggtaataaataacgggtaactgtcagatcaggtctgcgctaatacagctcaaccaatgccacctgcgggtggcgttatttttttgcgagacgacgcgtattcttttttgtaacttcctcgccttttgcttttccttccgagccgctttccatatccgttaacgcatgtaaaactctgctggcgttaacaaatgtgcaggggtaaaacgggggcacgctttgaacggtgagtatgagtgaggccggctaacttccagcaagtggctatgaacagcaaaatggtggtcgagtttagcttgttcttaccgttcaagcctttaaactgctgaaaataataatagtggagtagagagtttataaattgcgggcataaaaaaacccctactaaccgaagcccggcgttcagggttattacgccagaagaacttatttattcttggcgcgctcgaaggaagcaacgatttcagctttagcggcttctgcgttttcccaaccttcaactttaacccacttgcctttttcgaggtctttgtagtgctcgaagaagtgagcgatttgcgctttcagcagctctggcagatcgttaacgtctttaatgtgatcgtattctttgctcagcttggtgtgcggaacagcaatcagtttcgcatcttcaccggcttcgtcggtcattttcagtacgccaaccggacggcagcggatcacagaacccggctgcagcgggtacggagtcgggaccagtacgtcaaccgggtcaccgtccagagacagagtgtggttgatgtaaccgtagttgcacggatagaacatcgcggtggacatgaagcggtcaacgaacagtgcgccgctctctttgtcgatttcgtatttgatcggatctgcgttagccgggatctcaataacaacgtagatgtcttccggcagatctttacccgcagggacgttgagtaagctcatgtctgtttcctttaaaaatatgtggcaaacaagtgccgagtattatagccaactcgcgccgaatgtcttcgcttgttttcgtcttcattttcctttttcgccagttttaagacggtatacagagcaggaaaatccataaccgtagccgcatttttcatagtgagatgaaagcgattacaaacttgtgattaacgttttatttacttttttgaagtgtgatgtaacgcaatccgttacataacgaattgtctatagttttttcgcgaacatcttttcaccaataataattaccccgacgaggacaaccctatgtggaaacgcttacttgtagtctctgcagtctcggcagccatgtcgtctatggcgttggccgctccattaaccgtaggattttcgcaggtcggatcggaatccggctggcgcgccgcagaaaccaatgtggcgaaaagtgaagccgaaaaacgcggtatcacactgaaaattgccgatggtcagcaaaagcaggaaaaccagattaaagcggtacgttccttcgtcgcacaaggggtggatgcgatctttatcgctccggtggtggcgacgggttgggagccggtattaaaagaggcgaaagatgccgaaatcccggtcttcttgcttgaccgttccatcgatgtgaaagacaaatctctctatatgaccaccgttactgccgacaacatcctcgaaggcaagttgatcggtgactggctggtaaaagaagtgaatggcaaaccatgcaacgtggtggagctgcagggcaccgttggggccagcgtcgccattgaccgtaagaaaggctttgccgaagccattaggaatgcgccaaatatcaaaattatccgctcgcagtcaggtgacttcacccgcagcaaaggcaaagaagtgatggagagctttatcaaagcggaaaacaacggcaaaaacatctgcatggtttacgcccataacgatgacatggtgattggtgcaattcaggcaattaaagaagcgggcctgaaaccgggcaaagatatcctgacaggctctatcgacggcgtgccggacatctacaaagcgatgattgatggcgaagcgaacgccagcgttgaactgacgccgaacatggcaggccccgcttttgatgcgctggagaaatataaaaaagacggcaccatgcctgaaaagctaaccctgaccaaatccaccctttatctgcctgataccgcaaaagaagagttagagaagaagaaaaatatggggtattgagggttgctatgcctgatgccgattcgtaggccggataaggcgctcgcgccgcatccggcggtggtgcgctgaagcctgatgcgacgcttaccgcgtcttatcatgcctactgggagcacgctttacaccgggggaaaccatgacgaccgaccaacaccaggaaatcctccgcaccgaaggattaagtaaatttttccccggtgtcaaagcgttagacaacgttgatttcagcctgcgccgtggtgaaatcatggcgctgctcggtgaaaacggggcgggaaaatcgacgctcatcaaagcattaaccggtgtataccacgccgatcgcggcaccatctggctggaaggccaggctatctcaccgaaaaacaccgcccacgcacaacaactcggcatcggcaccgtctatcaggaagtcaacctgctacccaatatgtcggtcgctgataatctattcataggtcgcgaacccaaacgtttcggccttctacgccgtaaagagatggaaaagcgctccaccgaactgatggcatcttacggtttctccctcgacgtgcgcgaaccgctcaaccgcttttcagtcgcgatgcagcaaatcgtcgccatttgccgggctatcgatctctccgccaaagtgctgatcctcgatgaacccaccgccagtctcgacactcaggaagtagagttactgtttggcctgatgcgtcaacttcgcgatcgcggcgtcagcctgatcttcgtcactcattttctcgatcaggtttatcaggttagcgatcggatcaccgtcttacgcaacggcagttttgtgggctgtcgggaaacccgcgagctaccgcagatcgaactggtaaaaatgatgctggggcgtgagctggacacccacgcgcttcagcgtgccgggagaacattgctgagcgacaaacctgttgccgcgttcaagaattacggcaaaaaaggaacgatcgcgccgtttgatctcgaagtgcgccccggcgagatcgtcggtctggcaggcttgctgggatcaggacgtaccgaaaccgccgaagtgatcttcggtatcaaacctgctgacagcggcactgcgttgatcaaaggcaaaccgcaaacgctacgctcgccacatcaggcttcggttcttggcattggcttctgcccggaagacaggaaaaccgatggcatcatcgctgccgcctcggtgcgggaaaatatcatccttgctctccaggcccagcgcggctggctacgacctatttcccgtaaagaacagcaagagattgccgaacgctttatccgccagcttggcattcgcacaccttcaactgaacaaccgattgaatttctctccggcggcaatcagcaaaaagtgttgctttcacgttggctactgacccgaccgcaatttctgatcctcgacgagccaacgcgcggaattgatgttggtgcccacgccgagatcatccgcctgattgaaacgctgtgcgccgatgggctggcgctgctggtgatctcctccgagctggaagagctggtgggctatgccgatcgggtgattatcatgcgcgatcgcaaacaggtggcggagatcccgctggcagagctttccgttccggcgatcatgaacgccattgcggcgtaaggagaacagtgtgatgcctcaatctctcccggacactacgccgccgaaaaggcgttttcgctggccaacaggaatgccgcagctggcggcactgttgctggtgctgctggttgatagcctggtggccccacatttctggcaggtggtgcttcaggatgggcgtttgttcggtagccctatcgacattcttaaccgtgcggcccccgttgcgctactggcgattggcatgacgctggttatcgccaccggtgggattgatctctccgtaggggcggtgatggctatcgccggagccacaacggctgcgatgacggtcgcgggattcagcctgccaattgttttgttaagcgccctgggcactggcatcctggcgggattgtggaacggcatactggtagcgatcctcaaaattcagccgtttgtcgccaccctgatcctgatggtcgccgggcgcggcgtggcgcaactgatcacctccggacagatcgtcacatttaactcaccggatctctcctggttcggcagtggatcgctgttgttcctgccaacgccagtcattattgcggtgctgacgcttctcctgttctggctgttgacccgcaaaacggcactggggatgtttatcgaagccgttggtatcaacattcgggcggcaaaaaatgccggggtaaacacgcggatcatcgtcatgctcacctacgtgttgagcgggctatgtgcggcgattgcgggcattatcgtggcggcggatattcgcggtgccgatgccaacaatgccggattatggctggagctggacgccattcttgcagtggtgattggcggcggatcgctgatgggcgggcgctttaacctgctgctttcggtggtgggggcgctgattattcagggaatgaacaccggaattttgctttctggctttccgccggagatgaaccaggtggtgaaagcggtggtggtgctttgcgtgctgattgttcagtcgcaacgctttatcagtctgattaaaggggtacgtaaccgtgataaaacgtaatttgccactgatgatcaccatcggcgtctttgtgttgggttatatctactgtctgacccagtttcccggttttgcttccacaagagtgatctgcaatatcctgaccgataatgcctttcttgggataatcgccgttggcatgacctttgtgatcctctccggtgggatcgatctctccgtcggttcggtgatcgcctttaccggcgtgtttctggcaaaagtgattggcgatttcggcctctcgccgctgctggcgtttccgctggtgttggtgatgggctgtgccttcggcgcatttatgggacttctgatcgacgccctgaagatcccggcgtttatcattactttggccggaatgttctttttgcgtggcgtcagctatctcgtttcggaagagtcgatcccgataaaccatcctgtttatgacacgctctcaagccttgcgtggaaaatccctggcggcggtcgcttaagtgcgatgggactgctgatgctggcggtggtggttatcggcatattcctcgcgcatcgtacccgttttggtaatcaggtatacgccattggcggcaacgcaacgtcggcaaacctgatggggatttccacttgcagcaccactattcgcatttatatgctctccaccggactggcaacgctggcggggattgtcttctcgatttatacccaggccggatatgcactggcgggcgtaggtgtggaactggatgctatcgcctcagtggtaattggcggtacgcttttgagtggtggcgttggaacggtattagggacgctttttggcgtggcgattcagggactgattcagacttacataaactttgatggcacgctgagttcctggtggacgaaaatcgccatcggtattttgttgtttatttttatagcattacagcgtggattaacggtgctgtgggagaatcgtcagagttcgccagtgacaagagtcaacattgcgcagcgataaaaacgcctctccgtgtggagaggcgcaggagcttacgcgtccgggaactcacggataaagcgttcgacatcttcaaccatatggtcgttgccgacaaagaacgaacggcgctggtgcagggtttccgggataatatccagaatacgctctttgccatcgctcgctttaccgcccgcttgttccgccaggaatgccatcgggttgcactcatacagtaaacgtagtttaccgtccgggtggctggcggtgcttgggtagagataaataccgcctttcagcaggttacggtggaaatccgcgaccagtgaaccgatataacgtgaggtatacgggcggttggtggatttatcttcttcctggcagaatttaatgtacttcttcaccccgttcggaaacttaatgtagtttccttcgttgatggagtaggttttgcctttctccgggaagcgcatccgttcctggcacaggcagaaaacacccagcgaaggatcataagtaaaggcgtgaacaccgcatccggtggtgtaaaccagcatagtagaggagccgtataccacgtaacctgccgcaacctgtttgttaccaggctggaggaaatcttcttccgttaccggcgtgccaacaggcgtaacgcggcggtagatggagaaaatggtaccgacagagacgttaacatcgatgttggacgagccatccagtgggtccatcagcaccacgtattttgcgtgttcacagccttcaaagacgacaatctcatcttcttcttcagaggcaatgcccgcaacgatatcgcgtgctttcagtgcggctttcagtttctcattagcgaacaggtcgagtttctgctgaacctcgccctgcacgttctcagcaccgctggcacccaggatatcaaccagtcctgctttgttgatatcgcgatggataatcttggcgcccagttttattgccgacagcaaagcagtgagctcaccggtagcatgagaaaactcgtgctgcttttcgacaataaattcacctaacgttttcataaaactttccctgcaatgtttatggagtaaagcgaccgcaacaatcttaacaaataatcccaatgttgcgctcaggtgaatcgcgccagcaaattacggattatcctgaaatgcgtttctcacttgcccgacatatgcgtaaaatgagcgccagattaaaaaaggatagtgacgtatgcgcattcatattttaggaatttgtggcacgtttatgggcggtctggcgatgctggcgcgccagttaggccatgaagtaacgggttcggacgccaatgtgtatccgccgatgagcaccttacttgagaagcaaggcattgaactgattcagggttacgatgccagccagctcgatccacagccggatctggtgattattggtaacgccatgacccgtggaaatccgtgtgtggaagcggtactggaaaaaaacatcccttatatgtcaggtccgcagtggctgcacgattttgtgctgcgcgaccgctgggtgctggccgttgccggtacacacggcaaaaccaccacggcgggaatggcgacctggattctggaacaatgcggttacaaaccgggatttgtgatcggcggtgtgccggggaactttgaggtttcggcgcgtctgggcgaaagcgacttctttgttatcgaagcggatgagtacgactgcgccttcttcgacaaacgctctaaatttgtccattactgcccgcgtacgctgatcctcaacaaccttgagttcgatcacgccgatatctttgacgacctgaaagcgatccagaaacagttccaccatctggtgcgtatcgttccggtgcagggccgtattatctggccggaaaacgatatcaacctgaaacagaccatggcgatgggctgttggagcgagcaggagctggtgggcgagcaaggtcactggcaggcgaaaaagctgaccactgacgcttctgaatgggaagtcttgctggatggcgaaaaagtgggcgaagtgaaatggtcgctggtaggcgaacataatatgcacaatggcctgatggcgattgcggcggctcgccatgttggtgtagcgccggcagatgccgctaacgcgctgggttcgtttattaacgctcgtcgccgtctggagttgcgtggtgaagcgaatggcgtcacggtatatgacgattttgcccatcacccgacggcgattctggcaacgcttgcggcgctgcgtggcaaagttggtggtacggcgcgcattattgccgtgctggaaccgcgctcaaacaccatgaaaatggggatctgcaaagacgatctggcaccttcattaggtcgtgccgatgaagtcttcctgctgcaaccggcgcatattccgtggcaggtggcagaagtggcagaagcctgcgttcagcctgcacactggagcggcgatgtggatacgctggcagatatggtggtgaaaaccgctcagccgggcgatcacattctggtgatgagtaacggcggttttggtggtattcatcagaaactgctggatggtctggcgaagaaagcggaagccgcgcagtaattcacagcctcagcctgatagagtgtgtgtaggccggataaggcgttcacgccgcatccggcatttgagcatagtgcctgatgcgacgcttgatgcgtcttatcaggcctacaggtgcaccgcatccggcaaaccatactcacatcaacaacgaaaattacccttcgttttccgctaactcacgcagatactggaaaatctggcgcgcggatttcggcggcttattcccttctttctctttcttcgcgttacggatcagagtacgcagttgctgacgatcggcatcgggccacagattcaatacttcagcgatggcgtcatcaccttgctcgatcagacgatcgcgcaggttttccagtttatggaacaacaccacttgctggttgtggcggtttttcagcttatccagcgcctgacggatcggctcaacatcgcgctggcgcagcatcttaccgatgagctgcaactggcggcggcgaccttccatcttaatacgctgggcgagctcaatagccgcgcgcagatccgcatctaacgggatcttatccagcgcgtttttccccagatcaacaatttctgcgcccaggcgttttagctcctcggcatcgcgtttaatttcacttttactgacccagataatttcatcgtcttcgtcttcgatgtcatcaccgggaacgtcgtcgagccagtcttcgggctgcttagtcatctcaggctccttaaaaaaagaggctaatgttaccagttaagatgcgcactgaaaaacggttctctgttagacttcagagaaactctctacattatggcacttgcaatgaaagtaatctctcaagttgaagcgcagcgcaagattctggaagaagcagtttcgactgcgctggagttggcctcaggcaaatcggacggtgcagaagttgccgtcagcaagaccaccggcattagcgtaagcacgcgttatggtgaagtggagaatgttgaattcaatagcgatggcgcgctggggatcaccgtttatcaccagaaccgtaaaggtagcgcatcgtctaccgatttaagcccgcaggccattgcccgcaccgtacaggcggcgctggatattgcccgttatacctcgccagatccgtatgcaggcgtggcagacaaagaactgctggcttttgacgcgccggatcttgacttgttccaccctgcggacgtttctccggatgaagccattgaactggcggcccgcgcggaacaggcggcattacaggcggacaaacgcatcaccaataccgaaggcggtagctttaacagccactacggtgtcaaagtttttggcaacagccacggcatgttgcagggttactgctcaacgcgtcattcgctctccagttgtgtaatcgccgaagaaaatggcgatatggagcgcgattatgcctacaccattgggcgtgcgatgagcgatctacaaacgccagagtgggttggggccgactgtgctcgccgtaccttatcgcgcctgtcaccgcgtaaactttctaccatgaaagcgccggtgatttttgccaatgaagtggcaacagggttgtttggtcatttggtgggggcgatagcgggtggtgcggtctaccgtaaatcgaccttcttgctcgactcgctcggtacacaaattctgccggactggctgacaattgaagaacatccgcatctgctgaaagggctggcatctacaccattcgacagcgaaggtgtgcgcaccgagcgccgcgatatcgtcaaagatggcatcctgactcagtggctgctgaccagctattcggcgcggaaactggggctgaaaagcaccggacatgcgggcggtattcacaactggcggattgccggacaagggctaagcttcgaacaaatgctcaaagagatgggcaccgggctggtggtgacggagctgatgggccagggcgtgagtgccattaccggtgattattcccgtggtgcagcgggcttctgggtagagaacggcgaaattcagtatccggtgagcgaaatcaccatcgctggtaatttaaaagatatgtggcgcaatattgtcaccgtcggtaacgatattgaaacacgcagtaatatacagtgtggttctgtgctgttgccggagatgaaaatcgccgggcagtaaaaaaactggcgcgtcctgccgcgctataaactaaaaaattacacaaaatcattcgcactgcatcgagacggaaagtgaatgagagccggggagcgtactcgtagtacgtgactcgggcgaatgagcgtagccgtcgatgaggcagtgtgaaggatgaagtgtaaataaaaaaggaagtgagcaatgcgtaaaagcctgttagctattcttgcagtctcctcattggtattcagttcggcgtcgtttgccgctgatctggaagacaatatggaaaccctcaacgacaatttaaaagtggtcgaaaaagccgataacgcggtgcaagtcaaagacgcgttaactaaaatgcgcgctgcggcgctggatgcgcaaaaagcgacgccgccgaagcttgaaggcaaatcaccggacagcccggaaatgaaagacttccgccacggtttcgacattctggtcggtcagattgacgacgcgctgaagctggcaaatgaaggtaaagtaaaagaagcgcaggctgccgcagagcaactgaaaacgacccgcaacgcctatcaccagaagtatcgttaattctttatttccctgttgcctgcactcaggtaacagggaacttatcatcgcaaatgatgcaccacctgattgctgctgccgcgccagatcagggaagggtcttttaaatcctgcacaaatttgccgtcgaccagcacgttaatcaaatcaacaacctgcatttgcgcagcgttgagttcgtcgagtttatagcctgtccacatccagatgtctttacccggacactcggcgcggatgcgttgtaccagcttcagaatatccggcacgttttgcggatgtagcggatcgccgccggagagggaaataccctggcgtttgatgcgagtgtcattcagatcgttaatgatctggtcttccattgctttggtaaatggctgaccggaatttacccgccaggtgcttttgttatagcaaccggggcattcatgaacacacccggagacaaacagggtgcagcgagtgccggggccgttgacgatgtcgacaggatagtactgatgatagttcattatttcacctggcttatcagtccgcgtgtaggctgcatccggtaatcaacgcctgatgcgacgctgtcgcgtcttatcaggcctacagccgttgccaaatgtaggccggataaggcgtttacgccgcatccggcatttgcttaacacagagtgaagattaacctatctgcccatttcccaaatgtttaacgcggcgcttaacttcttcctgcttaccagcgttaaacggacgtgcatccgggctacctaaatatccgcacacgcggcgagtcaccgacacacgggaggtgtcatggttaccacatttcggacaagtgaagcctttgctggtgcactcaaattcgccggtaaagccacactcgtagcattcatcgatcggtgtgttggtgccgtaatacggtacatgctgatagctgtaatcccagacatcttccagcgccttcaggttgtgctgaatgtttggatactcgccatagcaaatgaagccaccgttcgccagtggcgggtaaggcgcttcaaagtcgatcttgtcgtacgggttcaccttcttctccacatcgaggtggaaactgttggtgtagtaacctttatcggtcacgcccggcaccacgccaaactcagcggtatcgagacggcagaagcggtcgcacaggttctcactcggcgtactgtagaggctgaaaccgtagccagtttcttctttccactgatccaccgcctgacgcagacgctcaacaatagcaatacctttcgcgcgcagctgctcgttgtcgtaaacatgctcgccgccgaacagcgcgttaatggtttcgtggatgccgatgtaacccagcgaaatagacgcacgaccgtttttgaagatttcagaaacgtcgtcgtcagcattcagacgcacgccacaagcgccttccatatagaggatcggggctacgcgcgctttcacgccttcgagacgagcgatacgggtcatcagcgccttacgtgccaacaccagacgttcatccagcagcttccagaaggtggcttcatcgccttttgcttccagagcaatacgcggcaggttcaggctgatcacgccgaggttgttacgaccatcgtggatctgctcgccgttttcattttcccacacgccgaggaagctgcggcagcccatcggggttttaaacgaaccggtgactttcactacctgatcgtagttcaggatatccggatacatgcgcttgcttgcgcactccagcgccagctgtttgatgtcgtagttcggatcgccttttttatggttcaggccatcgcgaatcgcaaacaccagtttcgggaacaccgccgttttacggtttttaccgaggccggcgatacggttacgcaggatagattcctgaatcaggcgcgactcccagctggtgcccagaccaaaaccaaaggtcacaaacggtgtttgaccgttggcggtgtgcagggtgtttacttcgtactccagcgactggaaggcatcgtagcactctttgatggtacgagagttagcgtagccttcggcgtccgggatgttccactcttctgcggtcttgcgatgtttgttgtagctggcggtgacaaacggtgccagcacttcatcgatacggttaatggtggtgccgccataaatatggctggcgacctgagcaataatctgcgcagttaccgcggttgccgtagagatcgatttcggcggttcaatctcggcgttccccattttaaagccctgggtcagcatgcctttcaggtcgatcaacatgcagttgaacatcgggaagaacggtgagtaatcgagatcgtgatagtgaatatcaccacgttcgtgtgcctgcaccacgtcacgcggcagcaggtgctggcgtgcatagtgtttagccacgatcccggccagcaggtcgcgctgggttggaatcaccttgctgtctttgttggcgttttcgttgagtaacgaggagttggtctgctcgaccagaccacggatctcctggttcaggcgaccgcgtttttcacgttcaatgtcgcgatcgtgacggtactcgatgtaagcacgagccagttgtttgtatggccccgacatcagctggttttcaactgcggtctggatctcattgatatccacctggttgcggccctgcatctgctcgctgacaaccgcagcaacagtggcgcaataatcggcatcatcgacttccgctgctttagctgcacgcagaatcgcttctttgatgcgctctgatttaaacggcactttgcagccgtctcgtttcatcacatgcggtgtcatgatcgctccatatttttaagaacaggttatccacagaaattgggaaaggcgttttccggttttttcgtttcgttttccggtgctttccgcaatcgccatccgcttatccacaacgtcgcacctttttcgtggggagctgtagtagcaattatagtcgattaatacaacatattgggttgggacgcattttaaagtctatatatagtgctttgcatcaaggatgtttgaactttttttgatgtagctcaaagtaaaaagcagagcgtacggatgacgggcgctacagcgatatgtaaattttttaatgaattttttgattataaaatcaacaaaaacaacatactgacaggcaaaaccccggaatgacaggcattaccggggcttagcgaagatttacttctgtaaccaccagacagcctcaaaaggccgtaaagtcatggtacagggttgtggtgaggcttcttcgtagttatgcatcacaagctgccagttgccgagcattttccctggctgccagggttgggtctcacggctaaggttggcaatgaccagcaaggtttgccccttccactcacggcgatagcaccacaatacagggctgtttggcagcagatcctggtaatcgccccatgtcaggacggcttcttgcttacgcagtgcgattaacttttggtaggtgtaaaacaccgaggactcatcggccagcgctgcttctacgttgatttcctgatagttatcgcccaggccaatccacggttcgccagccgtaaacccggcattatcgccgttggtccattgcatgggtgtgcgactgttgtcacgggatttactggcgaggattgccaataactcgtcggcatcacgcccatcgttgcgcagctcggcaaacatattgaggctctccacgtcgcgatagtcagtaatgcgcgtgaaatgtgggttggtcatgccaatctcttcgccctggtagatatacggcgttccctgcatgccatgcagcaccatcgccagcatttttgccgcaggcacgcggtattcaccttcatcaccaaagcgagaaacaatgcgcggctgatcgtggttacaccagaacaaggcattccatgccacgttgtgcattccttgttgccagtggcggaacaatgttttcaacgccacaaagtcaggtttagccagcgtccatttttcacctccgggataatcgaccttcaggtgatgaaaattaaaggtcatcgacaattcactgcctgtcagtgccgcgtatcgctggcaatgctcaaggctggtggaggacatttcacctacggtcattaacccgcgtggcgtaaacacatcgcggttcatctcgtgcaaaaactcgtgtgctcgtggcccgtcggtatagaagcgacgcccgtcgccatccaggtcttcagggtaacgcggatctttggagatcagattcaccacatccaggcgcaacccgtcgaccccacgatcggcccagaactcacagacttttttcagctctgcgcgtaccgctggattctcccagttgagatccgcctgttctggtgcaaagagatgcaaatagtactgttcgctttctgcatgccagcgccacgcactaccaccgaattttgaacgccagttgttcggtggcgtttctggttctccatcgcgccagatataaaactggcggtaagggctttctttgttcagcgcctcgcgaaaccaggcatgttgggtagaggtatggttaaacaccatatcgagaatgatacgaatcccacgcgattttgcctgtgtcaccagttcgtcaaaatcgtccagcgtgccataggtgggatcaatcgccgtataattcgctacgtcgtaaccgttatcgacctggggagagacataaaagggggttagccagatggcatcaacgcccagtttatgcagatagtccaggcgttggataacgccacgtaaatcgccggtgccgctacccgtggtgtcctgaaaactctttggataaatctggtagataacgccgttttgccaccagtggggaagatgagtcattacgttattcctgcaaatgcgagggggcgcaattgcgccccgaagaaaattaaacaatgtccagcgtgcccaggcggtatttccgctgatagataaacgaggtgagtacaatcgggatgatgatggcgatagccattgccagcgcaaacacctgccagtagctcggctgaatcgagagaattcccggcaggccgcctacgccgatgccattcgccataacgccgttcaggccgcatagcaatcctgccagaccagaaccaatcatcgcgcacagcatcgggaagcgatatttcaggttgatgccgtacatagcaggctcagtgactccaagccaggcggagatagcggcaggcacggagatctcgcgttcattgtgcttgcggctggaaatgataatacctatcacggcggagccctgagcaatattcgacagcgcaatcagcggccacactggcgtgccacccatgctttgaatcatctgcaaatcaatagcaagcgtggtctggtgtacgccggtgatcaccagcggggcgtacaggaagccaaacaatgccgcgccaatcggagcaaagctgccggtcatcaggtgacgtaccgcaaaggcaacgccatcgccaatcatgcgaccaaacggaccaatcagcgcatgggcgaggaacaccgcgaggatcagcgaacagacgggcaccaccaccagatagaggtaatccggcacgatgcgcttaagacgagtttcaataacgcccagcgccagtccggctaacagtgccgggatgacctgcgcctgatagcccactttggcgatgctgaatatgccaaagtcccatacttccggcagctgctgcccgagcagataagcgttcatcagctgtggagaaaccagcgttacgccaagcacgataccgaggatcggtgtaccacccatttttttcaccgctgaccagcaaatcccgaccggcaggtagaagaagatcgcttcaccgatcaaccacagaaaatcgtagatcgtttgcagggaagggtacatttgcgccagcgtctgaccgttgctcatgggcaaatcgccgatcacattgcgaaaaccgaggatcaaaccaccactaatcaacgcgggcagcaatgggaagaagatctccgcgaaatgagagatcaactgctcatgccatttcatattctgccgggcggctttttttacctgctctttatcaacctgcgcctgtccggttgacgcaatcagtgcttgatagtaatcacccacgttggtgccaatcaccacctgaaattgcccggcattggtgaaacagcctttcaccatggggagttgctcaatttctttcggtctggcattggccggttggttgaggacaaagcgcaggcgagtaatacagtggctcaccgtcgcaatattgccgcgcccgccgaccatttcaatcaaccgatcgatatccgtttggtttattttgctcatcataaagccccatggcagatgacatttttggttggctgcagaatatattgcgcggaaaaatttaaaaacgggaacgttcccgaaacacagcgaagatcacaatttatcgttcgggaaacgatcaggacagggtggcggggatgatgatttgttgcggttcgctgcgcccggtgacctgcgcgatcaactggcaggccgcctggcgtccagcttcggcgtaaccgggatctacggtgacgatctccggatggaggaatttcattaacggtgtattaccgacgctcgccagttgcaaggtgtcgatgcgttgctcttgcaggtatttacttgcgccaagtgccagcgtgtcggttgcgcacagtaacgcggtagtttcaggcgtaatcacttttgctacgttctcatagccttgcttcatagcaagccctggcagagcggcaacgggatgcagtttatgcgctttgcagaacgccaggtaggcttcgtgacgtcgcttaccggtcgtcacgtcactgtgcggcacgccgagatagctgatattacgatgtccctggtcatacagccgttgcatcaggatcttgattgccccttcgtcgtcataacagaccgaagcaaagccttttgcgtcacgcgccagcagaaccagcgatgactgccagtgggctaacatttcttctgttatgccggtaaaaccgaacagcactacgccgtcgatattacgccgtttcagcacccccaaatgttcggcaactaattgtggggaaaactgactttccatcatgattggatcgtaaccttgttcatagaacgctggcagcatggtttgaacggcgagattttctgacaacgaatccagacgggtaacaatgatggcgaccactttatcgctttgcccacgcatagcgcgcgcagagcgggaaggggaaaatccatgctgattcatcactgcttcaacacgctcgcgcgtgcgctggctcacgccgctttcgttattcagcacccgggaaaccgtagatttccccacgccgcttaagcgcgcgatgtctttgatggtcagccgattttgcatcctgttgtcccataacgtgttgtttaattatttgagcctaactttacctgtgcattcagcaatgggtaaagtctggtttatcgttggtttagttgccagcaggtattatatcgccataaatgctacgaatattattggattctccttattatttgcggcgcttttttcacttaccggaggttatatggaacctgatcccacgcctctccctcgacggagattaaaacttttccggtaagcccgtcttttcacggcgttaccggatgcgtaaggccgtgacgttttaacgtccctgctcagctttattaccttcaggtaaggcttcgccacgcctgaagacatttctgtactgtttcagacagtgcggagggactccttatgtttaaagaaatttttacccggctcattcgccatttaccttcccgtctggttcatcgtgatccattgcctggcgcgcagcagacagtgaatgcggcggtcccgccttctttaagtgcgcattgcctgaaaatggcggtgatgcccgaagaagaattgtggaaaacgttcgacacccatccggaagggttaaatctggcggaagtggaatctgcccgcgaacaacatggtgaaaataaattacccgcacaacaaccgtcgccgtggtgggtacatttatgggtctgctatcgcaacccctttaatattttgctcaccattcttggtgctatttcttacgccacggaagatttatttgccgcaggtgttatcgcgctaatggtcgctatttctacgttgctgaactttattcaggaagctcgttccaccaaagcggcagatgccctgaaagcgatggtcagtaataccgcgacggtactgcgagtaattaacgacaaaggcgaaaatggctggctggagatcccgatagaccagctggtgcccggcgatattataaaactggcggcgggggatatgatcccggcagatttacgtatcttgcaggcgcgggatctgtttgtcgctcaggcgtcgttaaccggtgagtctctgcccgtagaaaaagccgctaccactcgccagccggagcacagcaatccgctggagtgcgacaccctgtgttttatgggcaccaccgtggtgagcggcacggcacaagcaatggtgattgccacaggtgccaatacctggtttggtcaactggcgggtcgtgttagtgagcaggaaagcgagccgaatgcctttcagcaagggattagccgcgtcagtatgctgctgattcgctttatgctggtgatggctccggtggtgttgcttatcaatggttacactaaaggcgactggtgggaagctgcactgtttgcgctttcggtcgcggtaggcttaacgccagaaatgttgccgatgattgttacctcgacgctggcgcgtggcgcagtcaagttgtcgaaacagaaagtgatcgtcaaacatctggatgccattcagaactttggcgcaatggatattctgtgcactgataaaaccggcaccctgacacaggataaaattgtgctggagaatcataccgatatctccggtaaaactagcgaacgcgtgctgcatagcgcgtggttgaacagccattaccagaccgggcttaaaaacctgcttgatacagcggtgctcgaaggtacggatgaagagtcagcgcgctcgctggccagccgttggcaaaaaattgatgagattccatttgatttcgagcgtcgtcggatgtcggtggttgtggcagaaaataccgaacaccatcagttggtttgcaaaggcgcattgcaggaaatcctcaatgtgtgttcgcaagtgcgtcacaatggcgagattgtaccgctcgatgacaccatgctgcgtaagattaagcgggttactgatacgctgaatcgtcaggggctgcgcgtggttgcggtggcgacgaaatacctgccagcgcgtgaaggagattaccagcgggcggatgaatccgacctgatcctcgaaggatatattgctttccttgatccgccaaaagagacaaccgctccggcactgaaggcattaaaagcgagtggaattaccgtaaaaatccttactggcgacagtgagttagttgcagcgaaagtgtgccatgaagtggggctggacgcgggagaggtggtcattggtagtgatattgaaacgctatctgacgacgaactggcaaatctcgcacagcgcaccacgctgtttgctcgcctgacgccgatgcataaagaacgcattgtgaccttactgaagcgcgaagggcatgtggttggctttatgggcgatggtattaatgatgcgcccgccttacgtgctgcggatatcggcatttctgtggacggcgcggtagatattgcccgtgaagcggctgatatcatcctactggaaaaaagcctgatggtgctggaagagggggttattgagggacgtcgcactttcgccaacatgctgaaatacatcaaaatgacggcgagctctaacttcggtaatgtgttcagcgtgctggtggcgagtgctttcttgcccttcctgccgatgttgccgctacacttgcttattcaaaatctgctgtacgatgtgtcacaggtggcgatcccatttgataacgtcgacgacgagcaaattcaaaagccgcagcgttggaatccggcggatctggggcgctttatggtcttcttcggaccgatcagctcgattttcgatattctgacgttttgcctgatgtggtgggtattccatgccaacacgccggaaacgcaaacgctgttccagtcgggctggtttgtggtgggcttactgtcgcaaacgctgattgtgcatatgatccgcacccgtcgtgtaccgtttattcagagctgtgcatcgtggccgttaatgattatgaccgtgatcgtgatgattgtcgggatcgcattgccgttttcaccgctggccagttatctgcagctgcaggcgctgccgttaagctatttcccgtggctggttgcgattctggcagggtatatgacgttaacccagttggtgaaagggttctatagccgtcgttacggttggcagtaaagaataaactgggcatggtggcccggaatcagattgcagacaaagtgagctttgttcatgccggatgcggcgtaaatgccttatcaggcctacaaattcaataaattgcaggaatcacgtaggcctgataagcgtagcgcatcaggcaattttgcgtttgtcattagacttaatccgggcatgatagcccggatttccatcaagattagcgacgaacagcgatcgcttcgatctcaatcttcacgtctttcggcagacgggcaacttcaacgcaagaacgtgccgggaaggtggcgttgtgttcggtgaagaaggcttcgtaggtagcattaacggttgcgaagtcgttcagatctttcacaaacacggtggttttaacgatatcgcccactttcaggccagcggcttcgacgatcgcttttacgttatccagcgactgacgcgcctgtgcagcgacatctgccgggacttcgcccgttttcgggtttaccgggatctgaccggaagtgataatcatattgcccagatcaacgccctgcacgtaaggaccgatagctgccggtgcattttccgtcgcgatagttttgctcatgatttctcctttattacagcggtaaaaagtctggctcattatagggagccagacttttattaccaaccgcaattaattggccagcaccacattatgagaaaactctttttcacagtatttgcatttgagcgcgatatcattggcgcgttttcgcacggcaaagctggatgaaaccggttcggcatggctgatacagttgctgttcgggcagaccagcacattgtcgatgcgctctggcagactggggcgcgatttgccaaccacttcatagttgtcgatacggttaaccgtggcttgcggtgcatataacgccagctgatcaacctgatcctcacttaaaaaggtattttcgattttgatcagatccttgcgccccatctcgccagaaggcaggttcagaccaatggtgatgcgctgatctgtttcggtcaacttgaacagactcaacagtttaaaaccgatctgggcggggatatggtcaattaccgtgccgcgtttaatagcttcaacctgcaatttattatcgtgtgtcatctctatttccccttacagtaccagatcgcgattcagaaccagtgccagtaacgcctggcgagcgaaaatcccgttgcctgcttgctggaagtaccaggcgtgaggcgttttatccacatccgtcgcaatctcatcaacacgcggcagcggatgcagcactttcatattggctttggcgttgtggagatcgctggcgcgaagaacaaactgcgctttcacgttggcgtactcggacgggtccagacgctctttttgcacgcgggtcatgtacaggatgtctacttccgccatcacttcttcaatagagctgtgcagactccaggcgatccctttttcatcgagcatatccagaatgtattgcggcattgccagcgcatccggcgcgataaagtaaaaacggttgccgtcgaacttcgctagcgcctgggtcagggagtgaacggtgcggccatatttcaggtcaccaaccattgcgacgtggagattgtccagacgcccctgggtttcctgaatggtgaataagtccagcaaggtttgcgtcggatgttggttggagccatcaccggcattcagtaccggtacattgccggaaaactcggtggccaggcgcgctgcaccttcctgcggatgacgcatcactatcgcatcgacgtaagtgctgataaccgaaatggtatcggccagcgtttcgccctttttacccagtgatgtattggcgctgtcggagaagcccaccacgctggcacccaggcggtgcatggaagtttcgaaagagaggcgggtgcgggtagaggcttcgaagaaacagctggcaataactttgtgcttcaacagctctggttgcgggttcgctttcagtttcgccgctgtcgccagcaccagattaaggtcatcgcgactaaggtcgtttatggaaatgatatgtttctgatatagcggattagccatcttttatctcctgacgcctgggcaaaaaaaagcccctcgattgaggggctgggaatgggtgatcaacgggaagaaaaacggcaggccagcgtcttttttcagacgcggtaagacaaaatgtcgaacacactgaaccatacatcctcccggcaaattgtccggcattatactcagctctgagagaggatcaagaagatgatgcagttataaagcaaggcaaacggttatcatgaatatatattcaattttaataagtaattaatttgcttgtgcaccagggctgtacgctttaccacacgtggtgcgacccaaacgatattgctgccagcaatcacgccaagaatttctggcaaagcatggaaatcaaggattcgcgctactgcccgaccatatccggcgacggtatggataaggataaattcaccattatgctcgacactcaggaccatttcagcgacggatcgacctgcgtcaggtgtgggaagtaattgaggattcaccgaataaattttttgtccttttgtatttctaatttttatgactcccagcaatttcagtagtcgtgaaacggttgactgactgatactgtcaaagccatggttttgcaaatcgcggcggatttcctcctgtgaaagataacttttttcggtaatcaggcgctgacagaccgccagttgcttcttttctttggcggagtaatcatcgtattccttcataatgcaccttttatttattattacctgatgatatttttcacattttataatgtgagagtggttcatttatcactacaccagatttgaaggccgctttgataagcggcctgtcgcgttaaatcatcgcggcgatactcagcacaatcatattcaacatcgtgagaatcagcagtagcggtgctacccatctcagataacggacccagggtacacgggcaatcgccagaccgcccatcactaccgcagaggttggcgtaatcaaattaaccaccccggaagcagactgataagcggtcaccaccagatcgcgttgtacatgagcaaaatcagcgagtggagccattattggcatcgttaacactgcaaggccggaagatgagggtaccagaaaagagagcaatacttccagccaataggtcacgttgatgaaaacagtggtggaaagccctgaaaccagattctcagcactgtgcagaattgtgtgcgtaatcatgccgttatccatcacgaccacaataccgcgggcgatgccgataatcagtgccacaccaaggagatcccgcgcgccgtcaataaaggtactggtgaaggtttcttcgcccatgcgggcaatgacacccacgatgaccgcagctgccagaaagacagcagagatttccgccatccaccaacccagtaccgctacgccgtaaatcataaaggcaaaggatgcagcaaaaagtatcaggatcgctttgcgcgtgggggtaaattccagcatcgtttctgaacgatttcccagaaaatgcgcctggttttcagccatcttatccgccacgatagagctttccggactgttgcgaactttgcgggcataacgcataacccagtaaacacaaatcacgtagcctactaacagcaaaataacacgcagcaaaatgccctgagtaaaggggatccctgcggcgttggcagcaatgacggtagcaaatgggttaatggttgagcccagcgtgccaatgcccgatcccaataacactgtggcggcagcgaccagaggatcaaagcgggcagccatcatgacgggcaccagcaacgtgtagaaggggagtgattcttccgccatcccataaatagtaccgccagcagcgaagagcgccatcaggatcggaatcatccactcttcccgaccattaaggcgagttgtcactcgttcgataccggcatctattgccccggttttatttactactcccaaaaatccaccgatgatcaggacaaacagcgcgacatcaatcgctcccgcagtgtaggtttgatggttgtacaagccgtcgatgggcgctaacaggacagccgtaataccctgtggttgtgcctcaacaggtgcgtaagtacctgcaacaggaacttcctttcccagtgcggcatttgtcaccatctgatattttcccgcaggtacaatccaggtcattgccgcaactaacgcaatcagcacgaacaagatggtataagcggtgggaaatttgaatttacccataatgtgatctccataatcacgggcatacgccactcgtcgacgcatgcccgtcagggttagtcgccgagagttgctaccatcaccgctttaatggtgtgcatccggttttctgcttcatcgaaaacaatagagtgggccgattcaaaaacctcttcagtaacttccagtcctttgaggccgtaggccatctcgatctcgcgtcctactgtggtgtgctcattatggaaggcgggcaggcagtgcataaatttaacttcagggttacgcgtggcagtaatcacctgttgattgatctgataaggtgccatcagactcactcgttctgcccaggcttcttttggctctcccatcgaaacccaaacatccgtatagagaaaatcaacgtcgtatacgccttcttccacatcctctgtcagggtgattctcgccccagtcacgctggcgatctcacggcattgtgttaccagcgcttcatctggccagaaagatttaggtgccaccagacggatatccatccccatttttgcagcaccaaccatcagcgagttccccatgttatttcgggcatcaccaagatacgcaaagctcagctctggcagcgttttgcctggcgcatgttccagcatggtcattaaatccgcgaggatctgtgtcgggtgaaattcattggtcagtccgttccataccggaacaccagcgaactcacctaattcttcaacgatattctgaccataaccgcgatactcaataccgtcatacatgcgtccgagtacgcgagcggtatctttcattgattctttatggccgatttgtgagccgctggggccgatgtaagtcacctgcgcaccttgatcaaaggccgcgacttcaaaggcacagcgggtacgggtagaggatttttcaaaaatcaacgcaatgtttttaccgaccagcgtttgtttttcgtttccagatttcttggcggctttaagattgatagccaaatcaatcaggtattgaatctctgctggggtgtaatcaagcagcttaagaaaattacggtttttcagtgaagtagccatggggatgtccttataaaaatggatcaagcgtggttatggggggtatcaaggcgaataagagtgcctttgtctccggcgagaatttccggaccatctgcaagagagccgatccctgcaatgccccggcactgactaacaaactttgcgcaggcggtgactttcggccccatagacccggcatcaaactgcatttcgttgagtaattccggcgtgacctgtgccagcgggcgttgggttggcttgccccagtcgagatatactgcgtccgcatcagtgaggatcaacaaggcgtcagcatggatctgacttgccagtagcgcggctgaaagatctttgtcgataaccgcttcaatcccatggtatccatcggctttttcaaccaccggaacaccaccgccaccattacagatcaccagatgatcgtgggcgatcagtgtctggatggcatcccgctcgacgatgcgtttaggttgtggagaaggtacgacccggcggaaagagtgaccatctgctttgaaaacccagcctttttctgcctgtagtacctgagtctgagcgtggtcataaattgggccgatgtacttagttgggttactgaaggcgggatcgttggcatccacttcaacctgcgtcagcagcacgctgatttcacgttgtggtagttgatttttcagcgcctgttgtagcatgtagccgatcatcccctggctttcggcccccagaatgtcgagtggatagggagcgacatgggcataggcgctattttgaagtgccagaagtccaacttgtgggccattcccgtgaaccagtacaacccgccagtgttgagtcagttgggcgatagttttagccgcaagatcgatatttttacgttggatttctgcttcgagtggttcgcctcgtttaagcagggcattaccgccgagagcgataaccagtgttggtttgttttccatgatctcttccttagataccgtcacgatgcaaagggcaactcatgcaacgtgcgccgccacgtccgcggcctaattcatcaccggggatgggtaaaacggtgatgcctgctttgtcatatttttcgttagtccagatgttgcgctcgtagcccactaccactcccggccgaagcgtgagcacattgttagcgtcattccactgttcgcgttctgcctcaaaggcatcaccccccgtggtgattaaacgtacctggtcaataccgagggctttttcgatagcatggaggagtgtgctttcttgagtacgtttcaggccgccgtgaccgtcaggtgttagcgtccagcaattaacatccgggcgcacaacttcgggataaaccgagaaggtgtcgatatcgatatgagtcataacggtgtcaagatgcatacaggagcggtgtttaggcagctcaacagcgattacccgttcagcctgacgatgtttaaacaatgcctgagcaagaaactcgattccttgtggcgtggtgcgttcagacatgccgatcaacacggccccccgaccaatcaccagcacatcaccaccttctaacgtggcgtggtcataattaatattctcgtcgccgaaatatttaataaattcgccgccagcaaattgtggatgccagcgataaatagcgcgtagattattggtttcacgttggcgagcaggttttgccattggattaatcgatacaccgttataaatccagcatgaggtatcacgcgtaaataaatgattcggtaacggcttcataatgaaatcattaatatcgtgggtatcaaccaccatatttttaattgaggcgggaatttcactataagtcagcccaccacttaaatgacgagcaaggtcccggtgtgacatctctgcaagccaggtgcgaacgtcagtagcaaacgtagggccgagtcggtaatctgatatttgtgtttccagtaaccagcttttggcttccgggatatccaatgtttgtgttagtaaatcagtgagtaacagaacttctatcccttgctggcgcagcgtattggcgaaaatatcatgctcttcacctgcccgctcaacggacaatacatcgtcaaataacaactcctggcaattggatggtgttagacgtttcagactgagatttgggcgatgcaacataacgctgcgtagttgtccaatttcagaaccaacataatgcttttccatcattattcctttaacactttttcaaaaataaagaggagatggctgcaaacaaattaaatgcttgtagtcaggtctgttcagtaattttcagatgcaatgattcagtttatttcttccagaaaatgtgacgactttcacaccggcggtgatattaataatcgaagttaataatatttgatgcggttctgataaatgataaagaaacaaaatacgataatgcattaatacgcaaatatacgcagagttattcttcgttgttaattgattgttttatttttcaggaaatgcctttaagtataatgcattgatatttatgtatattttaatattcattgcatatctatgcgaaaggataaggtgattatttttcacagcactattttcacgggataactatgacagcacgggcattaaaagctaagaaaatgaactgtgatctgactgagagttttcttttaacatatgcaataacaagatattaggaccaaaatacatagctaagttataagatttatgcagcaaaactgcatacaaaattactcctgcttaacatcagtacaacatctccagcaataaacatgcgcaagggcaaaacctgatgatttttctatggtgagaggtggctttttttcgtataaggaaagaagtgaaacattgttttaataaaggaagatattatgattgttggcaacatccatcacttacaatcctggctgccggaagaacttcgcgaagcaattgagtacatcaaatcacatgtcagcgatgagacagcaaaaggtaagcacgctattgacggcgaccgcctgttttatctgatttctgaggatacgactgaaccaggtgaactgcgtcgtgctgagtatcatgctcgttatctcgatatccagattgtattaaaagggcaggaagggatgacatttagcacgcaaccagcaggcgtaccagagactgactggctggcagataaagatattgcttttatcgggcaggggatcgatgaaaaaacagtgattcttaatgaaggggattttgtcgttttctatcctggcgaagttcacaaaccgctttgtgcggtgggagcccccgctcaggtacggaaagcagtagttaagctattaaaatcgtaagtgatcactgccgggggcgacctgtgccgccgcccggcaaaacgttattttgctaatgtagcgaccataacagcttttatggtgtgcatccggttttctgcctggtcaaagacaatacttgccggagattcaaagacttcatcggtgacttccattccaccatacagaccgaattctgcggccatttttttacccagcgtggtttgctcatcatgaaatgcaggcagacagtggaggaacttaacctgcgaattaccggtcagggccatcattttgctattcacctgatagtcacgcagcagggcaatacgctccgcccatttctctttgggctcacccatcgatacccagacatcggtatagataaagtctgcacctttaaccccagaggcgatatcttccgtcaaggtgattttacccccgtgtttttgtgccagagcactgcattcggcgaccagcgcagcttccggccagcatgcctgtggcgcgaccagacgcaaatccagaccggtaagcgccgcagcttcgagcatcgaattgcccatgttgttacgcgcgtcacctgcatagaccagcgtcatttcgttgaatgctttgccgggcaaatgctcctgcatggtgaggagatccgccagcagctgcgtggggtggaactcattggtcaggccgttccatactggcacgccagcgtattccgccagtgtttcgacaatctcctgaccatagccgcgatactgaataccgtcatacatgcgaccaagcacgcgggcagtgtctttaatcgactctttgtgaccaatctggctgccgcttgggccgagataagtaacgcgagcaccctggtcatatgcggcaacttcgaaagagcatcgggtacgggtcgagtctttttcgaagatgagcgcgatgtttttgccagtgagtctggcttcttctttaccgcttttcttatcggctttcagcttcgcggctaactgcaacaagctgttgagttcagctggcgtgaaatcgagtaatttcaggaaatgcttatgataaaacccggacatagatccctcctgtggctaacgccttaatgaattaaaattcaatctatatggatgattattcatttgcaagtctaaagcataaatctttgtcacaaaggtggaggcaatgtcagtggtgtgtgacaataagagtatcggcaggacattaagaggaatgagccatggcaaacccggaacaactggaagaacagcgtgaagaaacacgtttgattattgaagaattactggaagatggcagcgatccggacgcgctgtacaccatcgaacaccatctttccgcagacgatctggaaaccctggaaaaagcagcagttgaagcgtttaaactcggttacgaagtgaccgatccagaagagctggaagttgaagatggtgacatcgtgatttgctgcgacatcctcagcgagtgtgcgttgaatgccgacctgatcgatgcccaggttgaacaactgatgacgctggcggagaaatttgacgttgagtacgacggttggggcacttactttgaagatcctaacggcgatgacggcgacgatgaagattttgtcgatgaagacgatgacggtattcgtcactaattaagcgttgacgacaaaggctgcgttacctgatgcgctacgcatttcaggcccaggtagttcctgcaacctggtgaatttgtagcccggataaggcatttacgtcacatccagcatactcaaaaagtacgtggttaatgttcgaatgcccgcgagtctaagctcgcgggcattttttcaaagtttgcgtagcatccgtacttcacaatcgacatgacccgtgcagccaagcgcatagtcgatatgctcaaagcccaaatgctcataaagcgcaatggcttcctttaaaaaagcggtcgtttccagatagcagcgtttgaaacccatttctcgcgcctgctccattgccattaaggccagtttttttgccagccctttgccgcggatagccggaagaaaatacatcttttgcagttcgcaaatgtctgactcactcccggttaatggcgcaatcccaccgccgccgaccacttcaccctcgtactcaaccacccaatatgcgtggccaggctgactatacacttgatacagctcgtcaaggttcggatcggcgacggtgtagcctttatcagcggtaagaccgtattcggcggatacctgacgaatgacgtgggcgatagcaggattatcggcgacggtaagtttgcgcaaacggagtgcgggagaagcgacaacattcatagcatagctcaatttcaaatgtatgatttatagctcactttaataccaccctcgcttaggtggtgcaagaagaagataaatcagaaaatattacgcatatctctctgagataaagcgtattctaggcgaaccagtatcaattgactggaattattatcggtatgaatggaatttattttagggatatagttcatgaatgatgtaaacatcgggaaagataattctcggcactcgtttgttttcacaggcaaaggtggtgagtattttcttatttgtcttgtgaattttttactgacaattattactctgggaatatatggaccgtgggcattgataaaatgccgtcgttatatttatcaacatgtgacactcaaggggcaaccatttagttataagggaacaggtggtgccatttttgttagcatgttacttattgtggtggtttatcttctcagtatttcttgttttgcaggtcaacactttgcgctcggtttattcctgtttgctctcttgatctgcggtattccttgtatggcagtgaagagtctgcagtatcaggcgaacatgacctcactgaatgacattcgctttggctttaactgctcaatgatgcgtgcatggtgggttatgctaggactgcctgttctgttggcgttagttttttggttcgcactgtatcttattgcgcaagtgacgacatcgataggaggcttattctttaacttagtcgcattaagtttgctttctgccatcgggctaggtgttgtccatggtataacctatagtaaatggatgccattgctgggtaataatgcaacttttggcattcataagttttctattcaggtaaacgtaaaagaatgcattaaaggttgcatgctcgcaatattaaccatggttcctttcatcattgtgattggtattatgatcgcaccagtattccagcagttaatgatgatgaccatgttgggtgggtctgatgctggcagtgagtttgtattacaatattacccgcagattatggcttcttatttcctgtattttgtcgcgatccttgtttttgccagttatctctatgtcacgttacgcaatctgtttttgaataatctgacgctggcaaatgggacaattcgttttcattcatctgttaccgcgatcggtatgcttctgcgcatgttggcggtattaatggggtcctcaattacctgtggtctggcttatccctggctgaaaatgtggatggttagctggattgctaacaatacccatgtccagggcgaccttgattcgctggagttaaccaatgatgacaaaccgcaggatagcggttcgttaatgtggatatctcgcggtattatgccgtatgttccgtttatctaaataaaaaggccggagcatgctccggccttcgttttcactatgagtattacagcgcggcgataacagcctgctgttcaatcagcttcgctttcgcttctgcgtagccttccagcttctcacgctctttcgcgatgaccgcttccggtgcgcgggcgacaaagccttcgttcgccagcttgttctcaatacggctgatttcgccttcgatcttcgctacttctttcgccagacgtgccagctcatcttctttgttgatgaggcctgccatcgggatcagcagttctgcgccgtcgacgatctttgtaacggaaaccggacctttatcatcagcaggcagcacggtgatgctttccagacgcgccagcgtttgcaggaagccgcggttttcatttacgcgacgttctgcatccgcgctgcaaccacgcagcagcagctccagcggtttacccggcgcgatgttcatttctgcacggatgttacgtacagcaacgatcgcctgtttcagccactcggtgtcggccagtgccgcttcatcaacctgagacgcatcgtactgcgggaacggctgcagcatgatggtgtcggcagtgataccgcaaagtactttcacacgctgccagatggtttcggtgatgaacggaatgatcggatgcgcgaggcgcagcagaccttccagtacagtcaccagcgtatggcgagtaccgcgcagttcggcttctgttccaccgttcattaccggcttggtcagctccagataccagtcacagaactggttccaggtgaattcatacagaatgcctgcggcgatatcgaagcggaagctgtccagcgcttcgcggtacgctttgatggtctggttgaactccgccagaatccagcgatccgccagcgacagcgtcatttcaccgccgttgaagccgcaatcctgaccttccgtgttcatcagcacaaaacggctggcgttccacagcttgttacagaagttacggtagccttccagacgcttcatatcccagttgatgtcacgaccggtagaagccagcgctgccagggtgaagcgcagcgcgtcagtaccgtgcggctcaatgccgttcgggaactgcttctcggtgcgcttacggattttgtccgccagctgcggctgcatcatattgccggtacgtttttccagcagttccggcagcgaaataccgtcaaccatatccagtgggtcaatcacgttacctttggatttggacatcttctggccttcgtcatcacgaatcaggccggtcatgtaaacggtgtggaacggcacctgcggtttgccattttcatctttgatgaagtgcatggtcatcatgatcatgcgggcaatccagaagaagatgatgtcgaagccggataccatcacgctggttgggtggaactggcgcagtgcgtcggtgttttccggccagccgagcgtggagaaggtccacagcgcggaggagaaccaggtgtcgagaacgtcttcatcctgacgcagcgcaacatcagcaccgaggttattttctttacgcacttcgtcttcgttgcggccaacataaacattacccgcttcgtcataccatgccgggatacggtgaccccaccatagctgacgagagatacaccagtcctgaatatcgcgcatccaggagaaatacatgttttcgtactgcttcggtacgaactgaatgtcgccgttctcaaccgcttcaaccgctggtttcgccagtacatcggcacgaacgtaccactggtcggtcagcatcggttcgataaccacgccgccacggtcgccgtaaggaacggtcaggtcgtgcggtttgatctcttccagcaggccgagtgcgtcaaccgcagcaacgaccgccttacgtgcagcaaaacgctccagtttctggaactctgccgggatttcgctggaataaatgtcagattcgttacctttggtatcgaacacctgggcgctttcacggatatcgccgtcaaaggtcaggatgttgatcatcggcagggcgtgacgtttaccgacttcatagtcgttaaagtcgtgcgctggggtgatcttcacgcagccggtgcctttttccatgtcggcgtgttcgtcgccaacgatcggaatacgacggttaaccagcggcagaatgacatatttgccaatcagatctttataacgcggatcttccgggttaacggccacgccagtatcgcccagcagggtttccggacgggtagtcgcaaccaccagataatctttaccgtctgcggttttcgcgccgtcagccagcggatagcggatgtgccacatcgaacctttcgattcgcggttttccacttccaggtcggagatagcggtgcgcagtttcgggtcccagtttaccaggcgtttgccacggtaaatcaggtcttctttatacagacgaacgaaaacttctttcaccgcattggacaggccttcgtccatcgtgaagcgttcacgctcccagtcgacggagttgccgagacggcgcatctgacgggtaatcgtgccgccggattccgctttccattcccagattttgtcgatgaaagcttcgcggccgtagtcgtgacgggttttaccttcttctgcggcaatcttgcgctcaacgaccatctgggtagcgatcccggcgtggtcagtaccgacctgccacagggtgtttttgccctgcatgcgctgatagcggatcatggtatccatgatggtttgctggaaggcgtgacccatatgcaaactgccggtgacgttcggcggcgggatcatgatgcagaaactttcctggctttcatcgccattaggcttaaagtagccctgcttttcccagtgctcgtaaagcggctgttcgatatcttgtgggttatatgtcttttccattatttccaggttgccgtattcaggttgaaaccagccacgcggtaggctttatagcgttcgcgcgccagttgtttcagagaatcttcataaggaacgaagtctaccacttctgtgaaagcggtggcaaaatctgcaaagcatgttcgcagactaatcaatatatcgcgcgggctgctgctgcgtttttgcggccaggcgatctccaccggcgcaccgccacgcggtccttctcccgctaaattatgcggaacaaagctttctgccggacgcgcccacagggcttcatccagccggtaagcctgcttttcatcttcacaggcgatgagcacgcgcttaccgctgcgccaacgttctgcggcaatttcacacaccagttgctcaacggcgcttaagccatcgacggtggtgtcattgtccagaaggtagaacgtcgcgtttttcataaatggggcttcttgtggtggatttaaatacgcatcaggtatacaccgcagcgcctgatgcgacgctgttgtgtcttatcaggcctacgagttcagtgctgtgtgtaggtcggataaggcgctcacgccgcatccgacaataacagcattgcctgatgcgacgctgttgtgtcttatcaggcctacgagttcggtgctgtgtaggtcggataaggcgttcatgccgcatccgacaataacagcattgcctgatgcgacgcttgcgcgtcttatcaggcctacgagttcagtgctgtgtaggtcggataaggcgttcacgccgcatccggcaataacagccttgcctgacgcaattactcttcgccgttaaacccagcgcggttcaacaggaactgtgccagcaacgctaccggacgaccggttgcgccttttgctttaccagaacgccaggcggttccggcgatatccaggtgcgcccagttgtacttacgggtaaagcgcgacaggaagcaacctgcggtaatcgccccaccaggacgaccgccaatgttcgccatatcggcaaaattggactccagctgttcctgatactcgtcacccagcggtaagcgccatgcgcggtcaccggattgttcagacgcggcaatcagttcatgggccagcggattatggttcgccatcagaccggtaatgtgatgacccagcgcgatcacgcaggcaccggtcagcgtcgccacgtcaatcaccgcttccggctcaaaacgctcaacgtaagttaacacgtcgcacagtaccaggcggccttcagcgtcagtattcagcacttcaacggtttgaccggacatggtggttaacacatcgcccggacgataggctcgtccgccaggcatgttttcgcagcctgccaacacgccgataacgttaatcggcagttgtagctccgcgaccatacgcatcacaccgtaaaccgctgccgcaccgcacatatcgtacttcatctcatccatgccttctgaaggcttgatcgagataccgccggagtcgaaggttaaacctttacccaccagcacgattgggcgtgcatcttccgacgcgttgcctttgtactcaatcaccgacatcagcgattcgttctgcgaaccctgaccgaccgccagataggaatgcatccccagctctttcatctgctgttcgccgataacgcgggtgataacattcttgctgtagctgtcagccagctggcgcgcttgtgaagcgaggtaagcggcgttacagatattcggtggcatattgccgagatctttcgcggctttaatcccggcggcaatcgccagaccgtgctggatcgcgcgctcaccgctggtcagttcacggcgggtcggcacgttgaacaccattttacgcagcggacgacgcggttcgctcttgttcgttttcagctgatcgaaactgtagagcgtttcttttgccgtctcgacagcctgacgcactttccagtagttgttacggcctttaacgtgcagttcagtcagaaagcagaccgcttccattgagccagtatcattcagcgtattaatggttttctgaataacctgcttgtactgacgctcatccagctcacgttctttgccgcaaccaataaggagaattcgctcggaaagtacattcggaacatggtgcagcaacaatgtctgccccggttttccttccagttcgccccgacgtagcagggcgctgatgtacccatcgctgattttatcgagctgttctgcaatcggagaaaggcgacgtggttcgaagacgcccacgacgatgcaggcactccgctgtttctccgggctaccgctttttacactaaactccatgcactacgctcctgaatcttaaagacaacggcggtggctacagatagaattgcaagctttcgtaactcatgtccgctgttgcgatgacttcgtgttaatcttaacgttattacggcattggcacgtcagaacaaaatctgagaggtgaatccgttgagtataattatcttagcgacgatttcgacgactcaagagaataaatgacgtttaagccatgaaacaagctaaaatcctgcaaaagacgagtttttacgggcgtatttaaagtgataatcataagatatctggtgcgggagacgctcaaaagccagctggcgatactcttcatcttgcttttgatcttcttctgtcaaaagttagtgaggatcctcggcgcagcggttgacggcgatattccggcgaatctggtgctctcccttctcgggttgggcgtgccggaaatggcgcagcttatcctgccattaagcctgttcctcgggctgctgatgacgctgggcaaactgtataccgaaagtgaaattacggtaatgcatgcctgcggcctgagcaaagcggttctggtgaaagcggcaatgatccttgcggtattcacggcaatcgtcgcggcggttaacgtgatgtgggcgggaccgtggtcatcgcgtcatcaggatgaagtgttagcagaagcgaaagcgaaccctggcatggcggcgctggcgcaagggcaattccagcaagcgactaatggcagctcggtgctgttcatcgaaagcgttgacggcagcgatttcaaagatgtgttcctcgcacaaattcgaccaaaaggtaatgcacgtccttctgtggtggtggccgattccggacatttaacccagctgcgcgacggctcccaggtcgtcactctcaaccagggaacgcgcttcgaaggcactgcactgttacgtgatttccgcattacggatttccaggattatcaggcgatcattggtcaccaggcggtggcgctcgacccgaacgataccgaccagatggacatgtgcacattgtggaacactgacaccgatcgtgctcgcgcagaactgaactggcgtatcacgttggtattcaccgtgtttatgatggcacttatggtcgtaccgctgagcgtggttaacccacgtcagggacgcgtactgtcgatgctgccagccatgctgctgtatctacttttcttcctgatccagacctccctgaaatcgaacggcggtaaaggtaagctggacccgacgctgtggatgtggaccgttaacctgatttatctggctttggcgattgttctcaacctttgggacaccgtgccggtccgccgcctgcgcgccagtttttcgcgtaaaggagcggtgtgatgcaaccttttggcgtacttgaccgctatatcggtaaaactattttcaccaccatcatgatgacgctgttcatgctggtgtcgctgtcgggcattatcaaatttgtcgatcagttgaaaaaagccgggcaggggagttacgacgcgttaggcgcaggaatgtataccttgctgagcgtgccgaaagatgtgcaaatcttcttcccgatggcggctctgcttggggcgttgcttggtcttgggatgctggcgcagcgcagcgaactggtggtgatgcaggcttctggttttacccgtatgcaggtggcgctgtcggtgatgaaaaccgccattccgctggtcttgctgacgatggcgattggcgaatgggtcgcgccgcagggcgagcagatggcgcgtaactaccgtgcgcaggcgatgtacggcggctcgttgctctctacccagcaaggcttatgggcgaaagatggcaacaacttcgtctacattgagcgggttaaaggtgacgaagagttaggtggcatcagcatttatgcctttaacgaaaatcgtcgtctgcaatccgtacgctatgccgctactgcgaagtttgacccggaacataaagtctggcgtctgtcgcaggttgatgaatctgatctgaccaatccgaaacagatcaccggttcgcagacggtgagcggcacctggaaaaccaacctcacgccagacaaactgggcgtggtggcgctggacccggatgcactctcaatcagcggtttgcacaactacgtgaagtatctgaagtcgagcggtcaggatgccggacgttatcagctcaatatgtggagcaaaatcttccagccgctatccgtggcggtgatgatgctgatggcgctgtcgttcatctttggcccactgcgtagcgtaccgatgggcgtgcgtgtggtcaccggtatcagcttcggttttgtcttctacgtactggaccagatcttcggcccgctgacgttggtttacggcatcccgccgattatcggcgcactgttgccaagcgccagcttcttcttaatcagcctgtggctgttaatgagaaaatcgtaaccaagcaagggagcgaaagctccctttcacattgttgataaagtcaaatacgagttcgatcggtcccctcgcccctttggggagagggttagggtgagggggacagatcgcgcctgacttaccttcttctccctcccagcaaactccccaacatcccgcgtacaatctgattcgtcacctggcgagcggcgcttttggccattgtctgcaccacaccatctttcttcccgccgcgtggtccggtagtgccgaacaaaatatccttcaatccaccaagaatgccgtcatctaccgctatctctttccctttcgctggaggattattttgctgttcaatactcgcctgtacgcctttttgcaacatctcataggcggattcccggtccacgtcatcctcgtacttgccatacaccggggagtggttaatcaagccattgcgctcatcttccgtcaccggtcccatccgcgaacaaggcgcaatcaccatcgcccgttccaccacagaaggacttccttttgcatcgagaaacgagattaacgcctcgccggtccccagttcctggattgccttttcggtatcaaacgccggattggcccgcatggtttgcgccgcagcttttaccgctttctgatcttttggcgtaaaagcccgcaaagcgtgctgaacgcgattaccgagctggccgagcacattatccggaatatcagacgggttttgcgaaacgaaccagacgcccacgccttttgagcgaataagccttatcacctgctcaatcttatccagcagtacctgcggtgcatcgttaaacagcagatgtgcttcgtcgaagaaaaacaccagttttggcttctccagatcgcccgcttccggcaattgttcatacaactctgaaatcatccacagcaggctggcggcgtacagtttcggcatctgataaagcttctcggcgctgaggatattaataacgcctttaccgttggcatcggtgcgcatcaagtctttgatatccagcatcggctcaccaaagaagtgtgctgcgccttgctgttccagcgacaacagcccgcgctggatggcaccaaccgatgcgctactgatatttccgtactgattctggaaagatttggcgttatcgccgatgtactgggtaatcgcccgcagatctttaaagtcgagcagtaacagcccctgatcgtcagcaattcggaagatgatattcagcacgccagattgcacatcgttgagattcaacagccgcgccagcaacagcggccccagatccgaaaccgtcgcccgcaccggatggcctttctcgccaaagatatcccacaccaccaccggattagcatgcggttgccagtcatttacgccgatatttttaagccttgcgagcagtttttccgacgccgttcctgcctgcgcgataccggtcagatcgcctttcacatcggccataaacaccggcacgccgatttccgatagagactccgccagtttttgcagcgtgacagttttacccgtccccgttgcgccagtaatcagcccgtgacggttagccattcccggcagtaaaaacagttctgtgtccggcgtgcgggcaattaacaggggttcgctcatgagatttcctccagtttcctgcctggagtataggcaacggctgtgcactcttcaccgctaaattcagcagattgcgagacgccttccaaagagatttaagtgccgggcgacaggctcccggcaaagggatcagaagtcggctttcaggaccacgcggtagcgcgctttaccatcgcgtacatgctggatggcgtcgttaattttcgacatcgggaacagttcggtggtcggcgcaaccttgctgcgggcggcaaaacgcatcagcttacgcagctcataaggcgtgccggtagcagaaccagagatgctgcggtcgcccgcaattaacgtaaaggccggaacagacagcggcgtgagaaccgcaccgaccgtatggaaattaccgccataggtcagcgcctcaaaataaggctgccagtcgaggctgacgttcacagtattgataatgagatcaaactgccccgacagggctttcagtgcctgcggatcgcggctattcaccactttatcggtacccatcgccagtacttcctgctctttcgccggattagaactaaaggccgtcacctcgcatcccattgcgtgcagaagttttatagcgatatgccccagcccgccaataccaattaccccaacgcggctggtagcagtgatatggtgcatcaacagtggtttaaagaccgtgataccgccgcacaacagcggcccggcggactcgatatcaatattttctggcagtggaatcacccattgccagtccgcacgcaacttctcggcaaagccaccgcgattcataatcgtcggcaccgcaccttgctcgcagttgatctgattaccgctaatacaggtgtcgcagtgaccacagctacgcgccgtccagccaatcccgacacgctgaccgacctgcaaacctttatcctgcgcggcgctcccgagtgccaccacgcgcccaatcacctcatgcccggcaaccagcggatattgtgaaaatccccattcgttatcgatcatcgacagatcggaatgacaaatcccgcagtaatccacctgcacttcaacatcttgtggcttcagctcaccgggatcgtactcataaacttccagttcgccgcccgcttcttttgcggcatagctttttatcatcgacatttttgggtccttctctggtgttgtttgggaagtgtagagcatggcagggcggggtgcctggagtgtgacaaaggttacatatcgctgagtgtaatgctgaaaatttcagcacttagcgaggtgggtgcaagctggcgcttgcatggtggcgtgcgacaggtataatccacaacgttttccgcatacctcttcagtgccgaagtggcgaaatcggtagacgcagttgattcaaaatcaaccgtagaaatacgtgccggttcgagtccggccttcggcaccaaggnnnnnnnnnnnnnnnnnnnnnnnnnnnnnnnnnnnnnnnnnnnnnnnnnnnnnnnnnnnnnnnnnnnnnnnnnnnnnnnnnnnnnnnnnnnnnnnnnnnnnnnnnnnnnnnnnnnnnnnnnnnnnnnnnnnnnnnnnnnnnnnnnnnnnnnnnnnnnnnnnnnnnnnnnnnnnnnnnnnnnnnnnnnnnnnnnnnnnnnnnnnnnnnnnnnnnnnnnnnnnnnnnnnnnnnnnnnnnnnnnnnnnnnnnnnnnnnnnnnnnnnnnnnnnnnnnnnnnnnnnnnnnnnnnnnnnnnnnnnnnnnnnnnnnnnnnnnnnnnnnnnnnnnnnnnnnnnnnnnnnnnnnnnnnnnnnnnnnnnnnnnnnnnnnnnnnnnnnnnnnnnnnnnnnnnnnnnnnnnnnnnnnnnnnnnnnnnnnnnnnnnnnnnnnnnnnnnnnnnnnnnnnnnnnnnnnnnnnnnnnnnnnnnnnnnnnnnnnnnnnnnnnnnnnnnnnnnnnnnnnnnnnnnnnnnnnnnnnnnnnnnnnnnnnnnnnnnnnnnnnnnnnnnnnnnnnnnnnnnnnnnnnnnnnncgctcacctttcgcgccaaaactgcaaaattgcttctacaaatctgtcagaaataatcccccgacgggctgccgcgctgaaatgactgcttcgcagtgacgtcgtccagttctccgctgaccggtacgctgaaccgaaatatcccgtgcttaaatcgtccggatcttcatcaggcgcgttcgtcagtcctctttcaccttgttgctggaagtcgacgaaaataatattggctaaaacattattttgataattgccataaatagcttcatacgcatgagggaaattttctttccagtaccaggtggtatcgccgcaaaaccacggcgcggcagtaatattattaagctgagaatggaattgttttagatccctacgaaaggcttcaaccatatgattaaagtgttgagggtgtgacgcgtagtcactggtcattaagtcaaattcgccttgcatccagcatacgccgaggaatttgttatgcggattttttgccagtgcggctcgcgttctgctgactaaatcctggtagagcggggtatccgttccccaacgacaagcatcatggctggctccgtgccgttctgaatatgtcccctcgctgcccgcggtaaaagccgatccgccacggcaacacgggacgatgagaatccctgcattatcaggaatgaagggcagtaatttccgtgcaatatgcagtgcctggccaacggtgccgtactgtgtttgatgattcgttgccagaggatggtgataaccctgcatatcctgaacatcgtgtgggcagtgagtcagtggaataatgtcgttaaagtgacatggcgggcctccgggatgcgtatgcgtaaatctcgctaattgtttgattctgggatgaggcgcatcttccctgtccggtaatggcagtccttcgccatacgccatggcattagactgaccagcaacggtaagaacatagtaataattgggcgatattattgcgttcatataattttcgcgtaattgaaatgacaaattgatagcagggccctttaccggggccctgaagcgttagttttgtactgtgactttattatccttcacagagatcaaaactgaatccgtcaccgctttgccgcctgcagattcaccgccaataatcaatagactattattccagggcaatgatactccgtaggcccgaccttgcgataattcacccgatttatcccatttcccgttatgccaaagatgaatatcagtgctatatgattttttcaggccttcatgcgcatagttcttaccgttctggtaattttctcgtgaacctttgaatccggcccctccggcaaatataagagaatcattgcttatccccgcaaaaccgccagcgacgccatctggtgatgagacgggagcaagcctattccattttaaattatcaccggtgaaatcaagttcaaatacggcatccgttcgcaatccgggtttggcttcgccattaataagccaggttttatcacctttattcacaaccgccgcaccagccgttccgtaccagggagattcgccagcgtaactccattgctgggttgagggatcaaaagacaacagaaacttattgaagaaataatcttctgcttttttgtcaaaatagtgagcgttgattttatctatagcggttgaatcttttccagcctcgttgagatcttcaaaatagccattgaagatattctggttaacaccgccagtaacataagctttgccgttgtgtacaaaagtcacatggcccgccatgcccattggcgcgtgcgacatcaatttaacccagctattggttttggggttgtatttgtgtacgtcattaaatacctgagtcaagcccttgctatttttgccaatgccgccaaacacatacagatcaccatcaataaatgccgaggttgcttgatctcttggtccaccagggaatgcagctaacgctgtccattttttatctttggcctgtgtatccagcttgtaccatgccgtacctgcgctacctaaaccaatgtagacagtgtcgttatcaattgctccggtaccacttttaaatggcacaggagtttccggtaatacagacgcgtttgcggcaaatgaagccatcatgatagcaagcgccgttattgttttattcattgtgactgtctcctgtctactacagtttaaatgacacaccaatgcgataactgttttccgataaattatctctgccgttgtaaacaccctgacggtcaaggtagtcatattctatgtatggcgtaatatcgggcgtcatatggtattgtagaacaaatgcattttccgtcgcccatttcttatggtttgcatagcgataatcgttctgtttgctgtatagcgtcgtttgccatgcgaaggtgaaatcactattaatatggtaagtgacatatccatcccaacgatgaacgttatcacgagacatatcaccggataagtcttgttgtcggtaagctttccagtcgtaacgatagcgaatgccaaaattaagatcttttgtcgcgtcccaggacagttttacgtagggtccgtaacgtgtgccgttgctgctaaaatgcgttaacattcccgggcgtaccgtccattgatcatcaagtttaattgcgtaattaacttcaacctgaacatcattgagtgcggcattttcctttttattatcatgaatggtattccaggtattactttccatgcttgcccaccatccattttgccatccctcactgactttgagtcgagtctcataggcgtggcttccactacgatatccaccacgtacgtccagtgtcgcagcctgagaaattaatggggacgaaaagcacagtaataatacgccagaaagtattttagcctttttcataaatttcactcatttgtaggatacagaaagcaatacaaagcccgcataaacaattagcatttatgttgtgtaatattttttgccaggcttatagtgtctttggcaacgggtagctgtattttatattttttgtataatgtctcctgtgaaaaatctctttccacattatttaaataaacagagagccagattaaatacctgagtataaaatctctgctgatgtttaattgatttgaattttcgtaagctatatcgcttactcaatccattttacccagagtcataaaatagagtgtctgttgatctcattttcatattcctttcagactgaagtgcgttttcatcacccgatgagaaagaactgaagtgatgtttgccatagattgcgagatgcccagtttcattgactatcgtggtgcacctttatacctgttataccagatcaaaaatcacgcaatccatacaacaaaaccagatttgcaattcgtgtcacaaaatatgtcgatctttttctaagaggcagatgccatgtgaagccagacgaacacttgcggtggtcttcaaaaactaaagattttcttttaactatatgttttataaataatttatttagaatataaacaaagaaagctttgcaagctaactcagtgagcttggtgaaaataagtgtttacccgccatcaggctgagcataattctcatcatgaaatatgtttcttggtttgtggcttgtaactggtcactcctgatgtcgatctggagaggcttgttgatgctggtgttttcaggatgatgtttcaattagtttgtttgccatatcgcccggcgagtagctgtgattgaggagggtttaagtcgtagtgaccaaagccatatttaccaacggatgtagatgaaaaagcgtcgcctgcgttcccccatatctccaggataaaaaggaatgtaacaatctcatgacctaaactgacgaaccagccaggaataatcgctagggacctaagaattagcttgataatagccactaagaaattactgcgttccatgaaatagccattttgtggtaaatggagttgactaataatgtcatatgtgagacggctagttgaacgaatattaaattttgctgaattttttatgttgattttacttgttacagaacatatcacatgatatatagataagattagttgcattaatgatgagggttattattagattcgtatccgattgataaatatataaaggtacatagcatgcaagagcatggcgtttgtatggcaaagttattataagtaactatcgctactccatttaagttcactcagaagaactggtccacttacgttagttattaagcaaacgttcgcttttataaacataatcaggataaaaatgttggattattgctaacccagcacagctagtgcgcgtctgtaattctaagggaaaaacgatgaagaataaggctgataacaaaaaaaggaacttcctgacccatagtgaaatcgaatcactccttaaagcagcaaataccgggcctcatgcagcacgtaattattgtctgactttgctttgttttattcatggtttccgggcgagtgaaatttgtcgattgaggatttcggatattgatcttaaggcaaagtgtatatatatgggtcttccccgatcatggtgggaagactcagtacgccatattcagtttcccatagtggaacataactcccagtttaaagcgttcccggtttcggtatcccctggcctttatcctcagcagtctgatcttgctgttcagcgcctccgcatttccattcgagacgcgatgacgcattgcattcagtattccgtataaccgttttttaatggttttcgctgcgtttttcatcatcggcacatcacattcagacgccagcgatatccactgcaaccagtcattcctgcgttctgtgctccaggggcgatcccagatattttttgccagctctttcagtgtccagcactggcttgtctgttgcatctgttcccgcaaccacatcagcttttcctgccgggactcagtcatccatttgtcgctgtactgccacaggaagcgggtacctttggcctgacgacgactttcaacagggaggtgcggatgttcattctggcgggttttatcaaccacttcgcccagttgcttcgccacatggaagcgatcgaaggcgattttctcgaccgcattgggtaaatggatacgcgctgctcttatatagcccgcattcatgtccatcgacagtgttttgatggccaacaactgactgtcagtaagcgaacggagatagctggcaagactctctgtgccacgatcatcggttaatgccagtgcccgcccgtcgcgatcagataccacggttatatacctatgcccttttttaaaggcgacttcgtctacattcatatgacgcactgataaaggctttttaatccgcgacaggcctcgcttaaccgcgcgggtcatgatgccgtcaacggcattccagctaagtttaagttgttttctgaccgcatcaacggtgctgattttaagccatgagagcacgaacgattcgaacagcagagtgtaccgactgccggaacctgcccacggtacaggcagagtctggcagccatgctccgggcacataacgcggggaacatcggcttctactaatgtcatgaactggcaggtatcaaggtggcgccatttacgatgtcggtgatcgtgaacagaacaggatttcctgcaggtcggacaggttaactgagtattttcagcaattccgactgtaacagtaacggaacctgcattttcatcgagggtaagggatttaacctgccatggtgcagtcaggttaaggatatgggcatagagggatttttcgtccatataatttcattctgaagcttactttaaactgatattattattttttcccctttcttaatcttccattgcgttgggaagggaagatgtgttaaatgaatcattctcccctctccttttgttacctggtcttccaaaaaatatctcggtaatattaataaggttcacaatctttttttaagttgaattcactacaacaactataattaactcattaattgataaaattttgagaagaaggccaagtttcatttatacctttccgaaaacaaggacctttacaagaagcccttacaaaagacttccaccaagaaaaaagaacacaacctctctccttctttgggtcctcttttttaatattttgggggttgtgttgagaataattaatttaaaatttttaaaaaaaattttttttgcgcacacaaaattccctctataaaaagaacacaaaaggttgtgtggtttaaaacacaatttcccccaccacaagggaacatatatatccatcgattaaaaaaaggcttttcaacaacgcatccgctattgaacaaagaagttcaggctttaaaaaactggttgagtatccgtacttcgtacccgcatgctgagagcgagtgggtatttttatctcgtaagggaaatccgctttctcggcaacagttttaccatattatctcgacttccggtggtaatgccgggttgtcactggagattcatccgcacatgttacgccattcgtgtggttttgctttggcgaatatgggaatagatacgcgacttatccaggattatcttgggcatcgcaatattcgtcatactgtctggtataccgccagcaatgcagggcgtttttacggcatctgggatagagccagaggacgacagcgtcacgctgttttatagagatagttgagataccagggatggtgtttaaaactacattattcttacgatatatcaaaaatgattaaccatttattaattgatgttattgtaagtgtgattattaattttcataataaacattaagttaaccatatccatacaaaatacaatggtttatgttcttcaaaataaataaacaaaatcattcataaatttacacatcacttaaattctcctgtttccgcacttttttctttattttttaagcaactggaagttaatccactgcaatctattgttatattgaatcaaatcaatgaaaatagatgttgtcacatcagtgatattttatttttgtatgatatttaatgtaattgactgatagccacatcactccgtgtgtggttatctttttatctattgggctaattttgaccgattgaggtttcctataggtattcattcaaatatatctcagttaggagtactactattgtgagtaaacgtcgttatcttaccggtaaagaagttcaggccatgatgcaggcggtttgttacggggcaacgggagccagagattattgtcttattctgttggcatatcggcatgggatgcgtattagtgaactgcttgatctgcattatcaggaccttgaccttaatgaaggtagaataaatattcgccgactgaagaacggattttctaccgttcacccgttacgttttgatgagcgtgaagccgtggaacgctggacccaggaacgtgctaactggaaaggcgctgaccggactgacgctatatttatttctcgccgcgggagtcggctttctcgccagcaggcctatcgcattattcgcgatgccggtattgaagctggaaccgtaacgcagactcatcctcatatgttaaggcatgcttgcggttatgaactggcggagcgtggtgcagatactcgtttaattcaggattatctcgggcatcgaaatattcgccatactgtgcgttataccgccagtaatgctgctcgttttgccggattatgggaaagaaataatctcataaacgaaaaattaaaaagagaagaggtttgatttaacttattgataataaagttaaaaaacaaataaatacaagacaattggggccaaactgtccatatcataaataagttacgtatttttctcaagcataaaaatattaaaaaacgacaaaaagcatctaactgtttgatatgtaaattatttctattgtaaattaatttcacatcacctccgctatatgtaaagctaacgtttctgtggctcgacgcatcttcctcattcttctctccaaaaaccacctcatgcaatataaacatctataaataaagataacaatagaatattaagccaacaaataaactgaaaaagtttgtccgcgatgctttcctctatgagtcaaaatggccccaaatgtttcatcttttgggggaaaactgtgcagtgttggcagtcaaactcgttgacaaaacaaagtgtacagaacgactgcccatgtcgatttagaaatagttttttaaaggaaagcagcatgaaaattaaaactctggcaatcgttgttctgtcggctctgtccctcagttccgcagcggctctggccgatactacgacggtaaatggtgggaccgttcactttaaaggggaagttgttaacgccgcttgcgcagttgatgcaggctctgttgatcaaaccgttcagttaggccaggttcgtaccgctagcctgaagcaggctggagcaaccagctctgccgttggttttaacattcagctgaatgattgcgataccactgttgccacaaaagccgctgttgccttcttaggtacggcaattgatgctacgcatactgatgtactggctctgcagagttcagctgcgggtagcgcaacaaacgttggtgtgcagatcctggacagaacgggtgctgcgctggcgctggacggtgcgacatttagttcagaaacaaccctgaataacggaaccaacaccattccgttccaggcgcgttattttgcaaccggtgccgcaaccccgggtgctgctaatgcggatgcgaccttcaaggttcagtatcaataacctacccaggttcagggacgtcattacgggcagggatgcccacccttgtgtgataaaaataacgatgaaaaggaagagattatttctattagcgtcgttgctgccaatgtttgctctggccggaaataaatggaataccacgctgcccggcggaaatatgcaatttcagggcgtcattattgcggaaacttgccggattgaagctggtgataaacaaatgacggtcaatatggggcaaatcagcagtaaccggtttcacgcggtaggggaagatagcgcaccggtgccttttgttattcatttacgggaatgtagcacggtggtgagtgaacgtgtgggtgtggcgtttcacggtgtcgcggatggtaaaaatccggatgtgctttccgtgggagaggggccagggatagccaccaatattggcgtagcgttgtttgatgatgaaggaaacctcgtaccgattaatcgtcctccagcaaactggaaacggctttactcaggctctacttcgctacatttcatcgccaaatatcgtgctaccgggcgtcgggttactggcggcatcgccaatgcacaggcctggttctctttaacctatcagtaattgttcagcagataatgtgataacaggaacaggacagtgagtaataaaaacgtcaatgtaaggaaatcgcaggaaataacattctgcttgctggcaggtatcctgatgttcatggcaatgatggttgccggacgcgctgaagcgggagtggccttaggtgcgactcgcgtaatttatccggcagggcaaaaacaagtgcaacttgccgtgacaaataatgatgaaaatagcacctatttaattcaatcatgggtggaaaatgccgatggtgtaaaggatggtcgttttatcgtgacgcctcctctgtttgcgatgaagggaaaaaaagagaataccttgcgtattcttgatgcaacaaataaccaattgccacaggaccgggaaagtttattctggatgaacgttaaagcgattccgtcaatggataaatcaaaattgactgagaatacgctacagctcgcaattatcagccgcattaaactgtactatcgtccggctaaattagcgttgccacccgatcaggccgcagaaaaattaagatttcgtcgtagcgcgaattctctgacgctgattaacccgacaccctattacctgacggtaacagagttgaatgccggaacccgggttcttgaaaatgcattggtgcctccaatgggcgaaagcacggttaaattgccttctgatgcaggaagcaatattacttaccgaacaataaatgattatggcgcacttacccccaaaatgacgggcgtaatggaataacgcagggggaatttttcgcctgaataaaaagaattgactgccgggtgattttaaaccggaggaataatgtnatatctgaatttaagactttaccagcgaaacacacaatgcttgcatattcgtaagcatcgtttggctggtttttttgtccggctctttgttgcctgtgcttttgccgcacaggcacctttgtcatctgccgaactctattttaacccgcgctttttagcggatgatccccaggctgtggctgatttatcgcgttttgaaaatggacaagaattaccgccagggacgtatcgcgtcgatatctatttgaataatggttatatggcaacgcgtgatgtcacatttaatacgggcgacagtgaacaagggattgttccctgcctgacacgcgcgcaactcgccagtatggggctgaatatggcttctgtcgccggtatgaatctgctggcggatgatgcctgtgtgccattaaccacaatggtccaggacgctactgcgcatttagatgttggtcagcagcgactcaacctgacgatccctcaggcatttatgagtaatcgcgcgcgtggttatattcctcctgagttatgggatcccggtattaatgccggattgctcaattataatttcagcggaaatagtgtacagaatcggattgggggtaacagccattatgcatatttaaacctacagagtgggttaaatattggtgcgtggcgtttacgcgacaataccacctggagttataacagtagcgacagatcatcaggtagcaaaaataaatggcagcatatcaatacctggcttgagcgagacataataccgttacgttcccggctgacgctgggtgatggttatactcagggcgatattttcgatggtattaactttcgcggcgcacaattggcctcagatgacaatatgttacccgatagtcaaagaggatttgccccggtgatccacggtattgctcgtggtactgcacaggtcactattaaacaaaatgggtatgacatttataatagtacggtgccaccggggccttttaccatcaacgatatctatgccgcaggtaatagtggtgacttgcaggtaacgatcaaagaggctgacggcagcacgcagatttttaccgtaccctattcgtcagtcccgcttttgcaacgtgaagggcatactcgttattccattacggcaggagaataccgtagtggaaatgcgcaacaggaaaaaccccgctttttccagagtacattactccacggccttccggctggctggacaatatatggtggaacgcaactggcggatcgttatcgtgcttttaatttcggtatcgggaaaaacatgggggcgctgggtgctctgtctgtggatatgacgcaggctaattccacacttcccgatgacagtcagcatgacggacaatcggtgcgttttctctataacaaatcgctcaatgagtcaggcacgaatattcagttagtgggttaccgttattcgaccagcggatattttaatttcgctgatacaacatacagtcgaatgaatggctacaacatcgaaacacaggatggtgttattcaggttaagccgaaattcaccgactattacaacctcgcttataacaaacgcgggaaattacaactcaccgttactcagcaactcgggcgctcatcaacactgtatttgagtggtagccatcaaacttattggggaacgagtaatgtcgatgagcaattccaggctggattaaatactgcgttcgaagatatcaactggacgctcagctatagcctgacgaaaaacgcctggcaaaaaggacgggatcagatgttagcgcttaacgtcaatattcctttcagccactggctgcgttctgacagtaaatctcagtggcgacatgccagtgccagctacagcatgtcacacgatctcaacggtcggatgaccaatctggctggtgtatacggtacgttgctggaagacaacaacctcagctatagcgtgcaaaccggctatgccgggggaggcgatggaaatagcggaagtacaggctacgccacgctgaattatcgcggtggttacggcaatgccaatatcggttacagccatagcgatgatattaagcagctctattacggagtcagcggtggggtactggctcatgccaatggcgtaacgctggggcagccgttaaacgatacggtggtacttgttaaagcgcctggcgcaaaagatgcaaaagtcgaaaaccagacgggggtgcgtaccgactggcgcggttatgccgtgctgccttatgccaccgaatatcgggaaaacagagtggcgctggataccaataccctggctgataacgtcgatttagataacgcggtcgctaacgttgttcccactcgtggggcgatcgtgcgagcagagtttaaagcgcgcgttgggataaaactgctcatgacgctaacccacaataataagccgctgccgtttggggcgatggtgacatcagagagtagccagagtagcggcattgttgcggataatggtcaggtttacctcagcggaatgcctttagcgggaaaagttcaggtgaaatggggagaagaggaaaatgctcactgtatcgccaattatcaactgccaccagagagtcagcagcagttattaacccagctatcagctgaatgtcgttaagggggcgtgatgagaaacaaacctttttatcttctgtgcgcttttttgtggctggcggtaagtcgcgttttggctgcggatagcacgattactatccgcggctatgtcagagataacggctgtagtgtggccgctgaatcaaccaattttactgttgatttgatggaaaacgcggcgaagcaatttaacgacattggcgcgacgactcctgtcgttccatttcgtattttgctgtcaccctgtggtaatgccgtttctgccgtaaaagttgggtttaccggtgttgcagatagccacaatgccaacctgcttgcacttgaaaatacggtgtcagcggcttcgggactgggaatacagcttctgaatgagcagcaaaatcaaataccccttaatgctccatcgtccgcgctttcgtggacgaccctgacgccgggtaaaccaaatacgctgaatttttacgcccggctaatggcgacacaggtgcctgtcactgcggggcatatcaatgccacggctaccttcactcttgaatatcagtaactggagatgctcatgaaatggcgcaaacgtgggtatttattggcggcaatattggcgctcgcaagtgcgacgatacaggcagccgatgtcaccatcacggtgaacggtaaggtcgtcgccaaaccgtgcacggtttccaccaccaatgccacggttgatctcggcgatctttattctttcagtctgatgtctgccggggcggcatcggcctggcatgatgttgcgcttgagttgactaattgtccggtgggaacgtcgagggtcactgccagcttcagcggggcagccgacagtaccggatattataaaaaccaggggaccgcgcaaaacatccagttagagctacaggatgacagtggcaacacattgaatactggcgcaaccaaaacagttcaggtggatgattcctcacaatcagcgcacttcccgttacaggtcagagcattgacggtaaatggcggagccactcagggaaccattcaggcagtgattagcatcacctatacctacagctgaacccgaagagataattgtcatgaaacgagttattaccctgtttgctgtactgctgatgggctggtcggtaaatgcctggtcattcgcctgtaaaaccgccaatggtaccgctattcctattggcggtggcagcgctaatgtttatgtaaaccttgcgcctgccgtgaatgtggggcaaaacctggtcgtagatctttcgacgcaaatcttttgccataacgattatccggaaaccattacagactatgtcacactgcaacgaggctcggcttatggcggcgtgttatctaatttttccgggaccgtaaaatatagtggcagtagctatccatttccgactaccagcgaaacgccgcgggttgtttataattcgagaacggataagccgtggccggtggcgctttatttgacgcctgtgagcagtgcgggtggggtggcgattaaagctggctcattaattgccgtgcttattttgcgacagaccaacaactataacagcgatgatttccagtttgtgtggaatatttacgccaataatgatgtggtggtgcctactggcggctgcgatgtttctgctcatgatgtcaccgttactctgccggactaccctggttcagtgccaattcctcttaccgtttattgtgcgaaaagccaaaacctggggtattacctctccggcacaaccgcagatgcgggcaactcgattttcaccaataccgcgtcgttttcaccagcgcagggcgtcggcgtacagttgacgcgcaacggtacgattattccagcgaataacacggtatcgttaggagcagtagggacttcggcggtaagtctgggattaacggcaaattacgcacgtaccggagggcaggtgactgcagggaatgtgcaatcgattattggcgtgacttttgtttatcaataaagaaatcacagaacattgctaatgcaggtacgcaatattgcctgaagctaaaaaactgcacgttagccctttgtaggccagataagacgcgccagcgtcgcatctggcataaacaaagtgcactttgccgacaatccgaacagagcctgccaatggcaggctcaggtgctcttttacgctaccatgctgataatcaacacaataatcagcccaaccacggagttgaccagctccagcagaccccaggttttcaacgtgtcttttactgacaggtcaaagtaacctttgaacaaccagaaagatgcatcgttaatgtgggtgagggtgttggaacccgcagccgtcgccagtaccagcagcgccggattcacgccaaccagctgaccagttgctggatcaaggattgcagcactgataatcccggcggcggtcatcgccgaaacgacaccctgacccgtcgccagacgaattagcacagtgatcagccatgccataatgtagggcgagatattgccgtgggacatcaacatgccgatggtgtcgccaatgccggtgtcgatgatagtttgcttcaacacgccacccgcaccgatgatcagaatcaccattgcaatgcttttcaccgcactttcaaaagcgttcatcacccactgcatgtcatgaccacgtgcggtgccaaagagtacgaatgcaaccaccatcgcaataaacattgcaatcggcgaggaaccgataaagttaaccacttcccaggcaggggtatcttttaccagccagatattggcgatggtggtagagatcataatgatcgccgggatcagcggcaccagaatcgaaacgccgaaagagggcagattgttcatatctaccggttgatctgctttcaggaatgatggcgttgggcgctcaagattgccgaggaacttcggcaggatcagacctgcgcagattacacttgggatcgtcaccagtacgccatagatataaaccatccccatatctgcgccataagcattcaccagcgccacaggacccggctgcggtgggaacagtgaatgtgcggtagtggcagctgctactgccgggatcgccagtttcaggaacggaattttagcttcggcggcaatgacaataaccagcggcgctaacatgataaaggccacttcatagaacatcgccagaccaaaaatcaggccgatgataatcaccgacagctgtacatagcgcagaccgagacgcgccagcagcgtatgtgctatctggtgagccgcgccggagtcgaccatcaatttaccgatgaccgcaccgaacaccacgatgatagccagttcccccagcgtgttgccgaagcccgctttcatggtgtgcagcagcgacatcaaatccatgcccgccagcatcccgacggacagcgccgccaccaacaaagccaccattgaattgattttgaacttcaaattcagtaccagcatcagaccaatgccgaataccacccagagaatgttaagcacatgcataacgttttaccttacctggttgaaccgttgttattttgggcgacatgttatgtaaattggtcaaccattgttgcgatgaatgtcacatcctctgatcaataaccatcgattaccctttgctgcaatttgcagcaacaaccaggagagtgaaattcttgtgatgtggttaaccaattttagaattcgggttgacatgtattaccaaaaggtagaacttatacgccatctcatccgatgcaacgccacggctgcggtctggttgttcatccggatacctaaacaactccagggttccgcgtctctttgctgtggaacccactatgtgaaagaggaaaaatcatggaacagacctggcgctggtacggcccaaacgatccggtttctttagctgatgtccgtcaggcgggcgcaactggcgtggttaccgcgctgcaccatatcccgaacggcgaagtatggtccgttgaagagatcctcaaacgcaaggctatcgttgaagatgcaggcctggtgtggtctgtcgtagaaagcgtgccaattcacgaagatatcaaaacccacactggcaactatgagcagtggatcgctaactatcagcagactctgcgcaacctggcgcagtgcggtattcgcaccgtgtgctacaacttcatgccggtgctcgactggacccgtactgacctcgaatacgtgctgccagacggctccaaagctctgcgcttcgaccagatcgaattcgctgcattcgaaatgcatatcctgaaacgcccaggtgcggaagcggattacaccgaagaagaaattgctcaggcagctgaacgcttcgccactatgagcgacgaagacaaagcgcgtctgacccgtaacatcattgccggtctgccgggcgcggaagaagggtacaccctcgaccagttccgtaagcacctggagctgtacaaagatatcgacaaagccaaactgcgcgaaaactttgccgtcttcctgaaggcgattattccggttgccgaagaagttggcgtgcgtatggctgttcacccggacgatccgccgcgcccaatcctcggcctgccgcgcattgtttctaccattgaagatatgcagtggatggttgataccgtaaatagcatggcgaacggtttcaccatgtgcaccggttcctacggcgtgcgtgctgacaacgatctggttgatatgatcaagcagttcggtccgcgtatttacttcacccatctgcgctccaccatgcgtgaagataacccgaaaaccttccacgaagcggcgcacctgaacggtgacgttgatatgtacgaagtggtgaaagcgattgttgaagaagaacaccgtcgtaaagcggaaggcaaagaagacctgatcccgatgcgtccggaccacggtcatcagatgctggacgacctgaagaagaaaaccaacccaggttactccgcaattggtcgtctgaaaggcctggccgaagttcgcggtgtcgaactggcgatccagcgcgctttctttagccgttaatatccaccggcatggctgcgcgccgtgccggttccttcttccttgccgtcactctctgaagacggattctggagtttacgatgactactattgttgacagcaatctgccggttgcccgcccgtcatgggatcattctcgtctggaatcacgcattgtgcatctcggttgcggggcgtttcaccgtgcgcaccaggcgctgtacacccatcatctgctggaaagcaccgacagcgactggggtatctgcgaagttaacctgatgccaggcaacgaccgcgtgctgatcgaaaacctgaaaaaacagcaactgctgtacaccgtggcggaaaaaggcgcggaaagcaccgagctgaaaattatcggttcgatgaaagaagcgctgcacccggaaatcgacggctgcgaaggtattctcaacgcgatggcgcgtccgcaaacggcgattgtctctctgacggtcacggaaaaaggctactgcgctgatgcggcaagcggtcaactggatctcaataacccgctgatcaagcacgatctggaaaacccgactgcgccgaagtccgcgattggttacatcgtcgaagccctgcgtctgcgtcgtgaaaaagggctgaaagcgtttacggtgatgtcctgcgataacgtgcgtgaaaacggtcatgtggcgaaggtcgcggtactggggctggctcaggcgcgtgacccgcagctggcggcatggattgaagagaacgtcaccttcccgtgcaccatggttgaccgcatcgttccggcggcgacgccagaaaccttacaggaaattgctgaccagctgggtgtttatgacccgtgcgccattgcctgcgaaccgttccgtcagtgggtgattgaagataacttcgttaatggtcgtccggactgggataaagtaggcgcacagttcgttgcagacgttgtgccgttcgaaatgatgaagctgcgtatgctgaacggcagccactctttcctggcatacctcggttacctcggcggctatgaaactattgccgacaccatgactaacccggattatcgcaaagcggcctttgccctgatgatgcaggaacaagcgccaacgctgtcgatgccggaaggtacggacctgaacgcctatgcgacgctgctgatcgagcgtttcagcaacccgtctctgcgtcaccgtacctggcagattgcgatggacggcagccagaagttaccgcagcgtctgctggatccggtgcgtctgcacctgcaaaacggcggcagctggcgtcacctggcgctgggcgtggctggctggatgcgttacacccagggcgtggatgagcagggtaatgccattgacgtggtcgacccgatgctggccgagttccagaagattaacgcgcagtatcagggcgcagaccgcgtgaaagcgctgctgggcctgagcggtatttttgccgatgatctgccgcagaatgccgactttgttggcgcggtgacggcggcatatcagcagctgtgcgaacgcggtgcgcgcgagtgtgtggctgcgctgtaactaactgattaccctacagacttactggtcaatcaaactgatatttggttgaccagttttcgtttttttgcccacctgtacgtgccaacttccagtgctaatggtatagtttgagattaacgggtgccgtaaaattgcccgttgtaggccggataaggcgttcacgccgcatccggcaaaaatttgattaaccgcacctaacggacacaacaccatgaaatctgccacctctgcgcaaagaccttaccaggaagtcggggcgatgatccgcgatctgatcataaagacgccgtacaatcctggcgaacggttgccgccggagcgtgaaattgcagaaatgcttgatgtcacgcggacggtggtacgtgaagcgctgatcatgctggagatcaaagggctggtggaagtgcgccggggtgccggtatctatgttcttgatagctcaggcagccacaacacagacagtccggatgccaacgtttgcaatgatgcgggtccttttgagctgttgcaggcgcgacagcttcttgagagcaacatcgccgagtttgccgccctgcaggctacccgcgaagatatcgtcaaaatgcgtcaggcattgcaactggaagagcgtgaactggcttccagtgcgccgggcagcagcgaaagcggtgacatgcagttccatctcgctattgccgaagcaacgcataacagcatgctggtggagctgttccgtcagtcctggcagtggcgggaaaacaatccaatgtggatccagttgcacagccatctggatgacagcctgtatcgcaaagagtggttgggcgatcacaaacagatcctcgccgcgttaatcaaaaaagatgcccgagcggcgaagctggcaatgtggcagcatctggaaaacgttaagcaacgtctgctggaattctcgaacgttgacgatatttatagaacatcgccagaccaaaaatcaggccgatgataatcaccgacagctgtacatagcgcagaccgagacgcgccagcagcgtatgtgctatctggtgagccgcgccggagtcgaccatcaatttaccgatgaccgcaccgaacaccacgatgatagccagttcccccagcgtgttgccgaagcccgctttcatggtgtgcagcagcgacatcaaatccatgcccgccagcatcccgacggacagcgccgccaccaacaaagccaccattgaattgattttgaacttcaaattcagtaccagcatcagaccaatgccgaataccacccagagaatgttaagcacatgcataacgttttaccttacctggttgaaccgttgttattttgggcgacatgttatgtaaattggtcaaccattgttgcgatgaatgtcacatcctctgatcaataaccatcgattaccctttgctgcaatttgcagcaacaaccaggagagtgaaattcttgtgatgtggttaaccaattttagaattcgggttgacatgtattaccaaaaggtagaacttatacgccatctcatccgatgcaacgccacggctgcggtctggttgttcatccggatacctaaacaactccagggttccgcgtctctttgctgtggaacccactatgtgaaagaggaaaaatcatggaacagacctggcgctggtacggcccaaacgatccggtttctttagctgatgtccgtcaggcgggcgcaactggcgtggttaccgcgctgcaccatatcccgaacggcgaagtatggtccgttgaagagatcctcaaacgcaaggctatcgttgaagatgcaggcctggtgtggtctgtcgtagaaagcgtgccaattcacgaagatatcaaaacccacactggcaactatgagcagtggatcgctaactatcagcagactctgcgcaacctggcgcagtgcggtattcgcaccgtgtgctacaacttcatgccggtgctcgactggacccgtactgacctcgaatacgtgctgccagacggctccaaagctctgcgcttcgaccagatcgaattcgctgcattcgaaatgcatatcctgaaacgcccaggtgcggaagcggattacaccgaagaagaaattgctcaggcagctgaacgcttcgccactatgagcgacgaagacaaagcgcgtctgacccgtaacatcattgccggtctgccgggcgcggaagaagggtacaccctcgaccagttccgtaagcacctggagctgtacaaagatatcgacaaagccaaactgcgcgaaaactttgccgtcttcctgaaggcgattattccggttgccgaagaagttggcgtgcgtatggctgttcacccggacgatccgccgcgcccaatcctcggcctgccgcgcattgtttctaccattgaagatatgcagtggatggttgataccgtaaatagcatggcgaacggtttcaccatgtgcaccggttcctacggcgtgcgtgctgacaacgatctggttgatatgatcaagcagttcggtccgcgtatttacttcacccatctgcgctccaccatgcgtgaagataacccgaaaaccttccacgaagcggcgcacctgaacggtgacgttgatatgtacgaagtggtgaaagcgattgttgaagaagaacaccgtcgtaaagcggaaggcaaagaagacctgatcccgatgcgtccggaccacggtcatcagatgctggacgacctgaagaagaaaaccaacccaggttactccgcaattggtcgtctgaaaggcctggccgaagttcgcggtgtcgaactggcgatccagcgcgctttctttagccgttaatatccaccggcatggctgcgcgccgtgccggttccttcttccttgccgtcactctctgaagacggattctggagtttacgatgactactattgttgacagcaatctgccggttgcccgcccgtcatgggatcattctcgtctggaatcacgcattgtgcatctcggttgcggggcgtttcaccgtgcgcaccaggcgctgtacacccatcatctgctggaaagcaccgacagcgactggggtatctgcgaagttaacctgatgccaggcaacgaccgcgtgctgatcgaaaacctgaaaaaacagcaactgctgtacaccgtggcggaaaaaggcgcggaaagcaccgagctgaaaattatcggttcgatgaaagaagcgctgcacccggaaatcgacggctgcgaaggtattctcaacgcgatggcgcgtccgcaaacggcgattgtctctctgacggtcacggaaaaaggctactgcgctgatgcggcaagcggtcaactggatctcaataacccgctgatcaagcacgatctggaaaacccgactgcgccgaagtccgcgattggttacatcgtcgaagccctgcgtctgcgtcgtgaaaaagggctgaaagcgtttacggtgatgtcctgcgataacgtgcgtgaaaacggtcatgtggcgaaggtcgcggtactggggctggctcaggcgcgtgacccgcagctggcggcatggattgaagagaacgtcaccttcccgtgcaccatggttgaccgcatcgttccggcggcgacgccagaaaccttacaggaaattgctgaccagctgggtgtttatgacccgtgcgccattgcctgcgaaccgttccgtcagtgggtgattgaagataacttcgttaatggtcgtccggactgggataaagtaggcgcacagttcgttgcagacgttgtgccgttcgaaatgatgaagctgcgtatgctgaacggcagccactctttcctggcatacctcggttacctcggcggctatgaaactattgccgacaccatgactaacccggattatcgcaaagcggcctttgccctgatgatgcaggaacaagcgccaacgctgtcgatgccggaaggtacggacctgaacgcctatgcgacgctgctgatcgagcgtttcagcaacccgtctctgcgtcaccgtacctggcagattgcgatggacggcagccagaagttaccgcagcgtctgctggatccggtgcgtctgcacctgcaaaacggcggcagctggcgtcacctggcgctgggcgtggctggctggatgcgttacacccagggcgtggatgagcagggtaatgccattgacgtggtcgacccgatgctggccgagttccagaagattaacgcgcagtatcagggcgcagaccgcgtgaaagcgctgctgggcctgagcggtatttttgccgatgatctgccgcagaatgccgactttgttggcgcggtgacggcggcatatcagcagctgtgcgaacgcggtgcgcgcgagtgtgtggctgcgctgtaactaactgattaccctacagacttactggtcaatcaaactgatatttggttgaccagttttcgtttttttgcccacctgtacgtgccaacttccagtgctaatggtatagtttgagattaacgggtgccgtaaaattgcccgttgtaggccggataaggcgttcacgccgcatccggcaaaaatttgattaaccgcacctaacggacacaacaccatgaaatctgccacctctgcgcaaagaccttaccaggaagtcggggcgatgatccgcgatctgatcataaagacgccgtacaatcctggcgaacggttgccgccggagcgtgaaattgcagaaatgcttgatgtcacgcggacggtggtacgtgaagcgctgatcatgctggagatcaaagggctggtggaagtgcgccggggtgccggtatctatgttcttgatagctcaggcagccacaacacagacagtccggatgccaacgtttgcaatgatgcgggtccttttgagctgttgcaggcgcgacagcttcttgagagcaacatcgccgagtttgccgccctgcaggctacccgcgaagatatcgtcaaaatgcgtcaggcattgcaactggaagagcgtgaactggcttccagtgcgccgggcagcagcgaaagcggtgacatgcagttccatctcgctattgccgaagcaacgcataacagcatgctggtggagctgttccgtcagtcctggcagtggcgggaaaacaatccaatgtggatccagttgcacagccatctggatgacagcctgtatcgcaaagagtggttgggcgatcacaaacagatcctcgccgcgttaatcaaaaaagatgcccgagcggcgaagctggcaatgtggcagcatctggaaaacgttaagcaacgtctgctggaattctcgaacgttgacgatatttattttgatggctatctgtttgattcatggccgctggataaagtcgacgcctgacttattataataagcgcaagggtaaacgttccttgcgctttcttaaattaagaagtcgcaatgagtattactttgtaaattgcaggggattgtttagctatctgtataacctgaatgttagtactcattcttcctggtagttatttaccaatataattccattcaccattttttaattcaaacagttctggaagagatgacggttgcagagtcatacgtttgagtggtgcattttcatcacccgggataggcttctataccaattattgggtcattacccaactcaatattagcattaagtaatgcggcaagggcgaatccggaagaatttgctacccctgttaccgtcattatctgatcaatatagatatcaatccttggctgctcattggtccatctttttgcctgagaagctggaagggttgaaatatatcctatcgtggttccggcataaccaggaacattgcaaccagggcctaatgttatttcatgaactgtatagtcctcaacaggatcgaaagggcctttcataaataaatttagccgtaatccttttgctaactctgtggcagcatgcgcctttttacatataccaccatatatttcgtctaaagctgaggtgattttcaagtttcgatagagcatacgtcctgttgttgtaataccattgaattctctgcatgtttctgtcacataattaaatggccaggactctttactaatatcaagttttctaatttcgacaacgctttttccatcgtaattatggttattgccacgagcaagaggcggaagatagatattttccgtatccatgcgtgcacgttcatgtttacgtgttaactcactgtcgacttttggatgatgaaggaagtgattatctgtaataatttaactctgaagggcattgcttaatggcatagacataatagttacctttatgagtatttcactgatgcttagaaaaatagataaatttttctgtagtaaaaagagaagtaaacaaatgacatgcatgtttctgttgtagtgatatcaactctacacagtgatattaaatggtgggaaacactctaaagtatcaaaaaacgctcatttaaaattatttgcatgcaatttaaaagcatatcttattactaattggaatttgatgttgctatattgatgtctatattaataatgcctgtgaatggtatttttgatgtatttgatatgttatcaatttatattatttacaaactaattgttttaaataatacatagctgattatgcggaaataaataatttcccaccggaattaagtagcggtggtgacaagtattttcatctacgtaactattcggaatattcagaatatactagcggtttttttttgagtttgatgatttttatcaaatcatgacttttttcctgaaaagtcagtagatattcataggcaagtaaggttttatactttgctgacaggattcaggcctgtctcagactgacatggatgtaatgaacaaaagggaatggctatggaaaatgagcatcaatacagtggtgcccggtgttcagggcaagccgcatatgttgctaaacgtcaggagtgcgcaaaatgatgcgccaatcacttcaggctgttttacctgaaatttcaggcaataaaacgtcaccgctgcgtaaatcagtatgcagcgatctcctcactctttttaattctcctcattcggcattaccgtcattacttgtttcaggcatgcccgagtggcaagtgcataacccgagcgacaaacatctccagagctggtattgccgtcagctgcgttctgcactgttatttcatgagccacggattgcggcgttgcaggttaatttgaaagaagcgtactgccacactctggcgatcagccttgagataatgctgtatcacgacgatgaatcgctaacgtttgatctggtctgggataatggcggttggcgcagtgcgacgctggagaatgtcagctaagcacaatctccagctcgcgcagttcacgccagaagcgttcggcaactggattcatgcgggtattcatccggtatgcataggcctgaatcgggatcaccagttcgtcccgattcagtacaacgagctgcccgctgcgaatttcttgttggatggcgtattccggtagccaggcaatcccacagccgtcgagggcaacctgctttaaaagctcgctcatcgaagagacaaaaaaggtgctgaaacttaactcactgtggcgcgtcagggtgcgattaatcaatcgccccatgtaggagttgcggctgtaattcagtaacggaaagtgtggctgcgcgaggttaaaaagtgcttctccgtgttcgtcactggcgcaaacggggaacaattgagattcaaataagcgaatgtggtcaaacggcgcttccagcaaatcttcgtcgtgaaaggaaaaaatacagtcactttgcccttcacgcagtttatcgaccgcttcatcgacatcaatagcttcaattgcccaggtaaagagcggcggcatctggctgataatggacggtaacagcccgagggaaagagagtgtgcagcggctattttaattttgcgttgcgcgtaatcgctgccaccacggagttctgcaaggttgctctctaactgttgcaacagatggcggatctgcgaatggaatattttaccttgttccgagagttgcagcggcgtcacctggcggttaaacaattcaacgccaatcgcctgttccagcgcacggatgcggcggctgaatgccggttgcgagacgttgcgactgactgctgcctgggaaaaattgcggcatttttccagggtcagaaaatcataaagccatttagtttcaatattatgcaaaaccgcaccacagtcatccattacgttttactctgtcagccgcccttgcgggcattctacgtccattcgggcggctgacaaccgtttatgccgtttcaaacgttcctttcacgcaggctttgccgtctttgaccatcagcttgccgcgagcgtatacctgctcaatgcgtaattctggcgtcatgaccagtaagtctgcgtcattgcctggcagaatttcgcctttcccgctcaggttaaggaaaccggctacgctactggtgagcgggcgcagggcatcgctgatactgaaatcataatctttgaccagcacctgcacggtttccagcaacgtttcaaaaccggcaacaccgatatgggttaaattcccttcgtcatcgaagaacggctggctaccgttgccgtcggagctgagggtgacgcgtgccagcggaatacccgcctgaacggcgcgggcaataccttcggcaggggcgactggttcgtcaatgctgctggtgatatcgatggtgccgcctttgcgcgcgaactccagcgcctgctcaaacaacggaacgttgcggttaacgtgggtcggcagcaacttgctaatcggcacatcgcagttttccagcaggtcatagacaggctgtaacgcctttttgctgtcgcccatgtggaacacggtgacgccaggtttaccgccgagcaaaccgccaacgcgggattccgccgccatattagccaggtgataaacgtccggtgcggcagaacggtgatcagagatggcgcatttcacgccaatcacgcgatcgataatcgccacgtctttttccacggaacccgtaatagtgcgggaagggacatgataagcgccggtcagcatccaggcgctgatgccttcttcattgagcgcacgggtcttggcgagcagggattccgggtggcgagagatagagtcggtgcccagcagaccaaccactgacgtgacgcctgcttccgtcagacgacttaacgccacttccggcgtgcgcgtcgtgggacctgcttcgccgccaccgccaatcaaatggacgtgttgatcaataaaacctgggcagaggatctgcccgctgagatcgacaaccgtgcagtccggtacaatgtcagaagggatattactggcaacggcgataattttgccgttagcgacgaggacatcgcaaattccccgatcttccggcgcatacaaatgcgctccctgcagcagggtaaaaccggctgcggtataatcaatcatggtaactccttgttaaacaataagctgcataacccagatcgacagcaatgcgttaatcacgcagaccgtaatgatatgcgggtaatatttggcattcacttcggctgtccccaggcagcgaccgacattttgcaccgggttgcccattaaatacatcgcgggcagtaaaacggtgacatcgtgaccggttaatgcgccagcggttgccagactggcggcaacaccgactgcgccacccatactcattaatgcggctaaaaggacggttgccgcttcaccgggtaatccccacagcgccattacgggttcacagatatgccccacccagtcgagcaggccggtaattttcagcgcctgaatgatgacaaacgccatcaccacgtttggcagcaggttggtcgtggcgatagtaaagccacggcgcgcaccatcgataaacatatccatgacgtttttgcggacctgagttgtcatgcttgcgctccttgcgttgggttgcgacgttcttcgaagttaagccagacgcgcaaaatgttggctccgacaaatttaaacaccaggatgactgctaaaggtacgattacggacgtgcccagaaaggcaaacaccgcgacgccggaagagaagtagttggtgataatggcgctaccgctggtttgatatgcggcgaaaatcactttatcgcgttcggtaatttcaccttcctgcgccagctctttggtcatacctgcggcggcatcggtgttttgcaggttagcgatcagcgccagcgagcagatccctggaatgcccaacaacggttttagcactggcgtcattaactgctgcgcggcgcgtaatccgccaagaccatcggtaattgaaataatccccagagagagaatgactgacggtgccagctccagcgcaaagagaaagccatctttagcccccgcgccacccgcgccgcgaaacgaggtggtggctccgttcgcaccaggcagttgcccaaacgatccgttcagaacggaaaaatcaaaaacgcgccaccaactgtctgtcccggaaaaaacaccggaaaaaaagattatggtgagaaaaaaagccagataccctttaatgcccactttttctgtcgccagctccccggctacagcatccccttgttgtgtcataacaatccccattgtttttttgtgtttgtgtgttgcttgagccaggaaaattcctggagctgaaaaaccttatcagccatgtgggtatggggaaaatgcaagtatgtttctgactatgcgttttttgcatagcggtaaaattacgctgtgtggaaaaggttctacgcaggattgagttgcagaaaattcataaacccagtgacaatgacatagtaaataaaaaacagataatccagggacgaaaacgcgatggcaaagtacaacgaaaaagagctggcggatacgagcaagtttttaagttttgtcctccgacacaaaccggaggcgattggtatcgtactggaccgtgaaggatgggcggatatcgataagctcatactttgtgcccaaaaagcgggcaagcggttaacccgtgcattgctggataccgtggttgccaccagcgataaaaagcgttttagttattccagtgatggtaggtgcatccgcgcggttcaggggcattcgacttcgcaggtcgctatttcctttgccgaaaaaacaccgccacagtttctctaccacggtacggcaagccgtttccttgacgagataaaaaaacaggggctgattgcaggtgagcgtcactacgtacatctctctgctgatgaagcaacggcacgcaaagtgggagcaagacacggatcgccggttattttaaccgtcaaagcacaggaaatggcgaaacgaggcctccctttctggcaagcggaaaacggggtctggctgacatcaacggttgcggtcgaatttcttgagtggtaagggaaacactcctcatgaagtgaccacttgcagcttaaataattgtactgtgctgataagcgcagcaataaacaacgccgccgcgccgcagagagtggcgccggcaagcgccgatgttccattgccgagcatactggtcagcgccgggccgaggatttgtccaatgccgtaaatgagcgtcacaaagcctaaaagattgagatttcccggtacgctcagttggcgggcgatagtcatcaccagagatgtcgtgcccataaaggtaccgccaaaaccaagactgctgatgataagcaagagaggcgagtcgctggcgagagtaagcagcacacagatagcctgcaccagcaaattcgccgtcaggcagggcaaagccccccaacgttttgctgcccatagccagccaaagcaaccaggcacaattgataagccgactaacgtccagagatgggcggttaacaatggtgagcctgcatctttcgccatgagcggcaggtaagtcgcgacgatgatataaccaaatcccgccaggccgtacagaatagccagtaaccaccagctcattatctgttgctccgtttttgccaatggcattggtgtgatggcgtgttttttcgagggcattaaaagcgtaagtgcaatcagcatcatgccagaaagcgccccggcgccttgccataacgtttgcgaggagaggtcaaaatgcaggcctgccagaacatattcattgcccagtgcgatgccaatgccaacgccagaaaacaaagctgccagcacaaaaggatggcgcgtgtgctgcataatcagcatcgaaccaaaaatcagcataccggcgctggcgacacccgccaggacgcgaatcaataacaccagaataaatggcagcaaccatgccattgcgaggatcaacaacccgctcgccagggcagaagccaacagaaatgggcgcaggcgcgatggctggtgaaatgcgccaaacgaaaatagcagactgccagccagataccccgcatagttgccgctggcaatccacgagagctggctaaatgaaaacgatccttccgccatcatgacgggcaacataggcgtataaaggaagcggcctaaacccatacctaaggtcagaaccagcatcccgaaaagcgcggtgctgaaagaaaagcgttctacgggatgcgagggcgaaggcatgtttaaccttgtttgtcatttttgttgttaacaagttaataacaaaaaggtgaaacatgccagcctgttaatgcgatgattgaggggtaaagcgataaaaacgatttggttcgctaacgatataaatattacctgaggcatccatcgcaaccccttcggcctgtttgatgttatgcgacaaacctcgactgcctttggttagtgacatttcacctataacctcgccagccagcgttacttcctggagtgcgcgagattcatgagacagcaccagaagcgtatttttttgttggttaaattctgcgccggacacatcatctaaagtaaattgccgttgtagtgccttgtctttgctgatgtgcaattcattgctacttaacagcccgttaactttgtagacctcaatcgggtttttctctttaaaaaaccagaaagtgtgatcctggcgagaataggccaatccttcaaaaccgcaattggttggggattcctgcagcgggatttttatttttttgaggatttttacttccgagtttggggtcagtgaaatcacataaatggcataatcgcgctcatcgctaatgacaaactgattatcgccaatgtattcgatcgtctcgagatccttaacaaaatccagaggaattgtgcggatcaaatcgccattggtggtcatttcaacaatggcggcaggtttgttgatagtgctaaaaagagtattgctttgtgccgaccaggtcagcgaagagatattattcgttatgcctgcaatttctttgccgtcaatggtggcgtggtaattctgaaatgatgctgcatgattgcttttacgggcgcaagattgcacgaagaaagtacacactgccacaatgacaaaaagaatcacaataacgaagatgcgtttacttaacgaaatactttttgtcacggtaatccctttaaggcaaatcaataagatatcgagaagtatacgtagcgatcttaatgaatccttaacgcggagaaatcccgtaatgtgcaatgcagcgccagccaccatcctgctgacaataaactgattccgtatgcccagggatcacccattgaatttcctcgccaggcggacaggtcagccaaatgcataacccgcagccgccgcgtaaatcacggggaatatcgctgacgcgaaaagtcatgcccgctgcctgcaacgccttgcgggtttgtatgacgccgaccgtggagtgaaataaaaacagatactctttcatgcgcgttttctctgccgctgaccgatcaccgccgcgccaattgcaccagcgaattgcgcatcagggtgagtttgtaccggcattcccagatggctttccagcatgtgggtaaacctttgacagtggctaacgccaccagtaaacagaatcggcgcttcacaggagagacgagcaatgaaattggcgctccgccgcgccatcgcgttaatcactccggcgagaatcgcttctggcgctacgcccgcagagcgcaggctgatcacttctgattcagcaaacactgtgcacatactcgtgatggcgtgcggtatgacattttcggtaatgctgtcgagttgctcgacgctggtgccaagcgtgcgcgagatcacctccaggaaacgcccggtgcccgccgcgcatttgtcattcatcaggaaatcgcacaggttaccgtcatcatcaagctgaatcactttgctgtcctgaccaccgatgtcgattactgcgcgcgttgctggcgcaagaaaccgtgcgcccagcccgtgacaggagatttccgtcacctgtttatcggcaaaatccaccagttgccgtccgtagccggtgagcgtcagaaacggcgttgtttctaacccttcgcgcagagtttcccaggcttcagtaattgctgttgccgggcgaaagggtgttggaacgaggaaacggcgcgtaatcacgccgtctgccagtaagatccctttggtggcggttgagccggaatcaatgccaatcgaatatgccactgccactccttacagcatctcaataaaggccgcgacacgggtgctgagctgcccgatatctgaggtggagtagtctgtttcaatagcgatataaggaatgttgtgctgatgacgcacatgacgtttaatcgccagcgattccaccgcgtaggtatggcacgcctgcaaaatcacatcaactacgccatcgacctgatattcttcaaccatctggctgagcatttgcaggcgctgatcgttcggcgaaacacaggagcagccaatcgccagatatttatccgccagcgcgtcgtagacatcgcccgtttctgccacgcattgctcggtcgctttcgccccggtgcagttttcataaccgacaacccagccgccattctcttcaattgcgcgcaccactttctctgctgcgccgccaattgggcagccggtgattaaaatgcgcggacgcgggtccagtcgctggccttcttcccactgctgacgaacgcgggcggtcattgcatccagttcattgatcaacgcctctttatcgaaccggaaggttgcgccgtagactactttcagaatgtcgctgccgctaagcgccggaggatttaactgccccaaatgataaaagttggccagtgcgcgacgttcgcggtttttcagcacaatggcatcgcgtagagcatcttcgctaatctcgtgcccaaaacgttcttctaccgttttatgcaagcgcagcatctcggctttccataacgcgcgtgaggcatcgtccttaacgctgtttggcagttgcatcacatgaacgggcttaaattccgccatgtattcatacattttctttttgccgtcgcaggtggtttcaccgaccaccagatcagaaaagtagaagtaggggcatttatcggttttgccgaagccgtagctgcttttaatcagcgggcagagattgcgcggcaggtctttttccgcttcttcaatggtttcatcagaggtggaacagagtgaaaccacaaccgcaccggctgccattgggatctcttgcggcataaaagtacagtaggtaccaaccagcggaatgccgcgctccttgagatccatgacggtgagaaagcctttctggcgagcttcagagaactgatcgaaaatggcgggtagatcggtgacaagtgacatgattttccttccccgtaccacgggagataatgaaaagaagccacattattaccattcttttagtgcggtttatttgatctctctcgcggttagccacttagtttttcatggatttctaaaaattgccgagggggaacaaagccgggagctgcgacagcaaatacaaaatcagcccaatacatccgccaaccagcgtaccgttaacacgaataaactgcagatctttgccgatatttaattctatttgccgcgacatatcccgcgcatcccagctttttaccgtatcgctgatgtggcgcgtcaggaatgcggaaaactcaggcgcgacgtggtgcgcggcttgttcaagatgaccatttaacgacgcccgcaaggcatcatcggcaattaacgtttcgccaaaccattgacccgctcgtgcgatgcgttctttcacacgagaatcttcactgttgatatccgctttcagccattcccgtaaatccccccacaattcactgagatagcggttaaaagcttcatcttctttcagatagctttttacggcatcggttcgcgctgccatttcaggatcgtttttcagcttgtcgatcagggcaaaggtggcgcgatcaaacgcatggcggatctgatgcgcacgatcgcgactaatatcatcaagcaaagaattcaccgcgtcagaaaccaactccgcgctatgttcgcccagccattcagtgggcaaaattttggctttcagtggatgctcactctccagccagcgaacaatctgctgggcgataaacttgcgcgatttatcgcgctggagaagggcgatcaactgtgcgatcagcgtatccagcagcacctgatgacgatcgtttttggtcatactctccagcatcaacgcactggtgccggaaagatcgaccttatcaatcgcccgatggactgcgcgcttaagcaggcgctgaatacgcgcatcatcggtcagttcaagaaaaccactcatgatctgcaacagatgctgaccaacgcggcgggcgttttctggctgactaaaccagttgccaatcaacaacgccggttcgtgacgtcgaatcaatgccaccagcgattgggtatcgagaaatttttcctgcacgaactgaccgagattttcgccaatccggtctttattacgcgggataatcgccgtatgacgagaaatgatcggaatcggcacgcggcgaaacagcgccaccaccgcaaaccagtccgccagcgcgccgaccatcgccgcttcagcaatcgccttcacgccgctcacccaaaaattgggtggcaaaaacagcgtaacgacaaaggtagcagcggcgataagcagtaaagagagcgccaacattttggcgcgtctgagttcaatgagtttattcataacgttaagaatagagcctgacggcaggatcgcgcaaaaatcaccgctcctccgccagctcggcagcctgatgctggcgcacgcgattgagcaatcccgccagggtgaaaacgacgataacgcccgctacgacggctaacagatgaaacggcaagcgaccgccgttaaaccacagccagcggccgatttcgaccgagacagacatcaccatcaggatcaccatattcagtgatgcggagacggtccctttcggtaagttattggaaaacagcgtaaagcggaataaggtcgggaagattaaaccaatcccgaaagcatacagactggtgccgagcaccgaccactgccagacgtgtggcgacagcaaattgccgacaatcaacagtgcgaggccggccagttgaatgggcacggcacgccagataaaccgcggttcggtcggatctttgataaatcgcgccacgatggtgttggcgacaatcaccgcgccgaataccggaacctgcgtccaggcgaactgcgaagttgttaagccgcccgcatcgatcaggatcaccggcgagacagccacccagctcatcattgggatatagctgagggcgatggttgccgcgccaaagaggaacagccggttgcaaaagacattgcgaaaatcgcgcaagacgcttttggcgctaaacggaaccgcgccgcgcttcaccgtctctggcatcgccagcagcaagccgacaaatgagataaaacccataaccgcaatgatggcaaaaaggactttccagtgcacaaagtgcatcagagctgcgccggaaagcgggccaataatcggcgcaatcagtacgatggaggtgataatcgccatcaacttgatcccttttgtctgtccgaacgcctcctgcaccgtgacataaccaacggtggcaataaaacagatactggtgccctgaattgcacgcgcgataagaaattgtgtcattgacgtggtgaacattgtcgcggcgcaggcaagggtaaaaattaacgccccggtaatcagcaccggcctgcggccaatcctgtcggaaagcggccccagcagccactgcaatgccatgcctccagcgagatagagactgacggcagccggggccagactgacatcggcattaaaatcacggaccacattaatgatccctggctggatcaggtccgtcgacagatacgcagcaaagtcatacaaaatcaacgccatcgggaaaaacagcgtggcggcatggcgggcaaaaaaacgtggcataacaaacaactccttgtccggagaatcccaatggggaaaacgaaattcaataccgtcggtaatgacgaaaggcaggcgagacgggcaaatgtactgaatttcatgtaatcaaccacactgcctgtgaacatacagacagagaaataccttctgactccaggtcagaatgtataacgattacaaatagtcatcagcacattacacctcttgaattgatgggttgcatagaaaatatacaccttaagtgtaattaaaatttgcggttaatcaaaagagtgcggtggaaaggggaatatctgccgggtacaggaaatgtaaaatgcgagcctgtttccggaaaaatgtatcgtttgcagaggaacaaaaatagcctggaaagcacctcggggaacgagaaattgccgggtgagaatggttttgttagtcgctacagtcgggccatcttatctacaggtgacggatcgccatgacaaacttcacgaccagcacgccgcatgacgcattatttaaatcttttctcacccaccctgacaccgcgcgggattttatggagatccacttacccaaagatttacgtgaactgtgcgatctcgacagcttaaaactggaatacgccagctttgtcgatgaaaaattgcgggcgctacattccgatattctgtggtcggtaaagacccgcgaaggagatggctatatttatgtggtgattgaacatcagagccgcgaggatatccatatggcctttcgcctgatgcgatattccatggcggtgatgcagcgccatatcgagcatgataaacgccggccgctaccgctggtcatcccgatgctgttttatcacggtagccgtagtccttacccctggtctttgtgctggctggatgaatttgccgacccggctaccgcacggaagctttataccgcagcgttcccgctggtggatgtcactgtcgtgccagacgacgagattgtgcagcatcgcagagtcgccctgctggagttgatccaaaagcatattcgccagcgcgatctaatggggcttattgatcaactggcagtattactggttacagggtgcgctaatgacagccagataaccgcgctgttaaattacattttactgactggcgatgaagcgcgttttaatgagtttatcagcgaacttatccgtcgaatgccacaacacagggagcgaataatgacgattgcagagcgaattcataatgatggatggctgttgggaagggagagggggaggaaagaagggaaagaagaaggggaaaagagcctcctccgattgttgttgcagaatggggcggatcctgaatggatacaacgatataccggactttcggcagagcaaatgcaggcattagatcagcccttgcctgaaagcaagcgcgatccatggatcgagtactaatcagagactgatgacaaacgcaaagcagcctgatgcgctacgcttatcaggtctacataacccattaaatatatttaactttaaagattttgtagacctggtaaggcgttcacatcgcatccggtatgaacaaagcgcactttgcctaagccatgctggaacgtggcgattaccctgcaaagataaaacgagtcacactctattcgtgagagtaaatcaggcgcttcgccactatgtcgaatttattccattgcccgatacacggcctcgccaatttgcttcagtgcttcgcgataggtttcgctgagcggcaaagcgcagttggtgcgcagacaattacggtatttgccggaagccgagaaaatcgagcctgccgccacctggattttcatgcggcacagctgccgcgcgacgcagaccatatcgacctgttcaggcaattctatccacagtaaaaatccgcctttcgggcgcgtaatacagatttcgcagggaaaatattcccgtatccagcaggtataaagtgccagattgcgctgatagatctgccgcatccgccggatatggcgatgatagtgaccttccagcacaaacgttgccgccgccatttgcgtggacggcacattaaagctgctgatggcatatttcatatgcagcagtttatcgtgatagcgccccggtgcgacccagcccacgcgcaggccaggtgcaatacttttactgaacgagccgcacagcagcactcgcccgtcgatatcccaggaatgaatggtccgcgggcgcggatactccgttgccagttcaccgtagacatcatcttcaaaaatcacaatatcatgacgctgagcgagagagagaacggcccgtttgcgcgcgtccggcataataaatcccagcggattattacagtttggcaccagaatgatgcctttaatcggccactgctccagcgccagttccagcgcttcaacgctgatgcctgtttctggatcggttgggatttcaatcactttcacgcccatgccacgcagcatctgcatcgaaccgtaataacagggggattcgaccgcgacaatatcgcccggtttacacaccgccattaacgccagcgacatcgagttatggcagccgctggtaatgatgatgtcatcggcggtgactaccgagccgctgtcgagcatcaggcgggcaatctgctctcgcaacactcgctgaccggctaacaagtcataaccgagaacggtttgcagattatgctgcaccacccggcttagctcccgccacagcggtttcaggctgggcgtttcgacatccggcgtgcttttgcttaacggaacaatggaactgtcgctatgcgcctccagcatatccagtacctgatcccactgggtaatttccaccgggcgctgcaccggacgcgtcatcggcggcactggcggctgggctttacgttgtgcgacaaaataccccgaacgcggctgcggagtgatgagcttcatcgtttccagcgtctggtacgcctgctgcacggtgctgatgctgacgccgtgctcctgacttaagctgcgcaccgacggcaatttctccccgtgacgatacagcccctgctcaatccgctcggcaagtagagtcgccagatgttgataacgcgtcatgctgtattccttatttggaccatacagagagaaaaaccggtacagatgaggctaaaaaaccggatgcagatgctgttttaatctgtctgtatgttaaataaaactaatatttgcatctgtattgtgaactgccagaagacggatgatgaagcctctgaaagatgaggaggcagcagatggaattttacgaaaacaaagccaaaacgccgtttatcagacttgtgcaactctggcaggcggtgaggcgttggcggcggcaaatgcagacccgacgagtgttacagcagatgagtgatgagcggttgagggatattgggttacgcagggaggatgtggagtgagggggaaaattccccttcccgtgtggggaaggggagagaaacttagcgtggcgttttgctactaatcaccccaataaactcctgcacctgcctttgtttacgcaccgacagtttgcacacctggcgcagtgactgcatcagttcgctctcttcgatggcgggtggttgggcggtgaggacaatacagccttccatcactttgacatctaccgccgtgccggtggcaaaaccggcggtttccagccactgacctttcagggtgatggcgggaatacggctgtaatccgggtagcggctcgcataactcacggttaattgacggttatttgccggggagacttctgcttcaaacggtagtgcaatagaatgcgtgtcagtcataactgctattccctataaatagtgattgtgatgagcggtgcgggtgtgcgccaacacatccgcatcgcgctaaatacctggatatatcatcagtaaatatgggaaaagtccagctaaaaatagaaaataataaaagcattactggaaagatctggaagggaaattaacgttaattcagaatggccggataacaaagtgtatccggccttcataattaatttaaagaactcatatggtgttctttaaaattctctgcctgtgccagcacacccatataaacatcatcattcgctactggcgggaacttatgcttgtgtagaagcagaataagttcaactttcagtttcgctttaatatcatcgcgtttactccagtcaggatatttagatgtgttgtcaaccacgcttttcatctcttttgccagtgacagcattttttcatcgtcataggtgaactgatatttatcgcgcatatgagcaagaatgtcgaaaaaggctttttcttcaatatcaatgcctaaatcggcccaggtgcccatttcggttttaatatcatagataatatcggtcatttcctgactgaatgtatcgaattcttcaccgttgagtacatcatcttctcgccgctcattataacgatctataatcgcctggaagcggcgggtgaagttaatcccttgcaactggttcactttcttgaagtcgctgatcgctttttccagtaatttttgtaataactggatcttcgttgccggaagtttgatcttgttaattcgcgccagataatcttcgtcaaaaatatcgatggattccgcttttttatcgccaagaaaataaatttcttctacgccatcagcttttaacgcttctgcaatcatttcacgaacgcgtgcattcatctgggtaacatccggtgcgtcacctttcgtcagtttgaaaacaattgaacgaacagcaagataatagtgaatatagtcacgttctgtctgtgataatgcttcgctgccgcagcagacgtcgtaggcggctttcatgcgtttaaccagtcccataaaacgacgttcaactttctgggtacgcagaacaaattccgccgcgcggttgaggcaggataattgcgcttgtggctcaccactaaaataatcccgactgtcaaattcgtaaaagacttgccccaacaaatcgagatggtttttaacttctattaccgattgctgaatatcttcaaagttggtggcatcaatgcgggaatacattgccagtgcctggttcatctgacttttaatgccgatgtagtccaccactaaccctttacttttgccttccagtttacggttaacgcgagaaatagtctggataagattatgtttttgtaagggtttatcaatatagatggtatccagttccgggacgtcgaaaccggtcagccacatatcaacaacaatggcaattttgaaattcgatttagcgtttttgaactgcttatccagctctttgcgatattcttttgtgcccagtaaatcataaagcgcctcgtcgtcatctttaccgcgcgtcatgaccatcttcaccatttctgaaggcggtaactctttctgctcctgttccgtcaggacgacgccatcgggtgcttgcttcacttcaaaccaggcagggcgaatagctttaagctgacggtagaaatcccaggcaatttcacggctggcacaaacaaacatggctttgccttttacggtggaaccttcggctacgcgtttttcataatgtttggcaaaatcttctgcgagggcttttaaccgatcttcatcacccagaaccgcattcatggtggcggtggcttttttgctttcgtcgatttgccactcattggtgcctgcgtttgcgcactcttcgtaatacttttcgacttcttccagtttgctggagtccaggatcactttagccgcacggccttcgtacacgatgcgtacagtgatttcatcctgaacggattcggtcatggtgtaactgtcgatcacctcaccgaagacatcgagcgtcgcgtcaatcggtgtgccggtaaagccaacataggtggcgtttggcagtgaatcgtgcaggtatttcgcaaagccatacgttttgcgcacttttccgctttctttatcaacgatgactttctggtcgaggttaacctggctacgatgtgcttcgtccgagatgcaaatgatattgttgcgttcagaaaggagttcggtgtcttcggtgaatttatggatcgttgtcagaaagactccgccactattgcgtcctgccagttgattacgcaaatcttcacggctggtaacgggaacgatggtgtcgtcgccaatgtaatttttggcgttgcacatttgcgcagaaagctgatcgtccagatcggtgcggtcggtgatcaaaacaatggtcgggctggcaaactccacgctcttcatcaaaagacgcgttaaaaattgcatggtgtaacttttaccacagcccgttgcgccaaagtaagtgccgcctttaccgctaccgaaaggtttacgcgcttgcttgatgctgtaatagagtttgcgggcggcatagtactgcggatatcggcagcaaatttttacttcgtgcttggctttatccgggaagcagataaagtttttaatcacatccagcagacgtaccggatgaaacagcccctgaatcattgagtgcaatgatggaattccgtcctgttcacggttttcattaccggtgactttgcgccatgagtaaaagtattcatagggcgcaaacaggttgcccatccggttatttacgccatcgctaataatgcagagcgcgttgtagataaacagttgcggaatatcccggcgatagcgtttacagagctgcttccaggcatcgccaatactggcttcctgctcgcgcaccgcacttttaaattcaaagacgaccaatggcagaccattgatatagagaatgccgtcaggaatacgagtctgattatctttgccggagattttaagctggttaacaatcttaatccggttaagcggcggattcatataggaaggcgggagttccgccgcctgttgcaacgggacatcttcggcgtcaaatatctggcgcagtgcggcaggtagatgccgggtgtcgagcaattcaatatagagatctttttgttgccgatcgtcgcgtttgaacagaaaaccatttgccagccagcgacaaaatgttttgttgctttcataaagatcggaggccggaagcgtggtgaactgtttgatcagtcgctgaatctcttcttcagtaatgccatcaggctggtagcgtgccgctaaataatgacggagatcgtcttcgataatgacctgatcgaggctcgaacgtgggacattatcgccgatcaggtgttgatatccctgatcctgtaacagttcaatgatcgcttgttctaattttgcttcactgaaagagagactcatatcgcgctccaaccctggctaatttctggtaagcattcccgtatcagtagaaaaccttaccagaaagcccctgattttacaggggcaaaatgcgttatgcggcttctgtatcggtggtgagatccggaagatcttccagggatagctcgccggagatgagtttcgggagcaaggtgcctcggaggttggtgagatattcgttttgaattaatgagttattcatcatctctctgaaattgcttgttaattcatcaaatttctcaattatatttattgatggaataattagaggtaatgtacaaatatcatcaggttttatagcaggatatgctccaccatcagcaattctcgctagttcttctatatttttatcataggtcacaaagtaataaatgaaatttttatatatcgtcttttgggctctaataacggcaaagcctgtgctacccgttagaccatcaacatgtacatatgcaaatgatctgttagcaggtctgacaaggccaaaaatcagatcatctttttttaatattcttcgagctcgacttggagcatcattaaatgataatttttcaattgagtatattctgccatctttcgcattagagagatctacataattgatataatctggttgatttttattagtccacgatgtggagtttataaaagctatctctggaagcgtcccttctttccacccctttggcacccaacccaactccgtttcttcaaattcacttgggaaaagcgagcgaatttccgccggaagcggtttaaaatctgcactattacgtactttttgacgcaatttggcgcgagtttgcagggcttccgggattggatttcctgcatccagagcgttatcaatcactggatcaaaatccacaaaccaggatttgaacagggtttgggacatttgttccaaggtttggttcatggatgaaagtgttgtgattttgtcatcaaaagctttgagactcttgactattaaatcttgaacatttagcgaaggagcagatatttctacattcgctagatcattgatggttatttggctttgagcagaaccgctatcaagatatcgtaaattactctgtagaaacagataataaaaatattcttttcttacttttgtttcatccaaatttattttaatggacaaatttgttaaataacaatctctagtcgttattttaacatcgccagttccaccaacacctcgggcaacaacaattaactcacctgccgaagtatttttttcagggtagctttctgtgtatttatatcctgaaaaaatgacatagtcacctgtaccaacaaactcctttttaggcatttttccgtatgaaaattcagctatatcacctaagcgatatatacaccacttactccccataacccagcgcctccagattctggcgaatcgcacgatccagttcttccgcctgcttcatctgctcaaacaacgtcttcgacaattcacgcattttggtctcaaatgccacgccgtcttcttcctgctcggctgcacccacatagcggcccggtgtcagaacgtagtcgttatctttaatatcttgcagggtcgcaactttgcagaagcctgcctggtcttcatatttttccagcttgctgtcaccacgcgcaatccgtgcagccagttcttccggcgtgctgcgccaggcatggtaggtatcggcgattgtggcaatatcttccgccgttaactctttagttgtgcggctaatcatggtgccgaggttacgcgcatcaataaacagcgtctcgccctgacgatcacgataacctttggccgggtcggcagccttcgatttggtcataaaccataaacacaccgggatctgcgtggtgtagaacaactgtccaggtagggcgatcatgcagtcaatcagatcattttcgatcatctgtgcacggatctcgccttcaccgctggtgttagaactcatcgaaccgtttgccagcacaaaacctgctgtgccgttagccgacagcttggagagcatatgcaaaatccagccgtagttggcgttaccggttggcggcatacgataaccggcaaagcgtggatcttcggttaattcggcttcattgcgccagtctttcaggttgaacggcgggttcgccagaatgtagtcggctttcaggtccgggtgctggtcgctaaagaaagtgtttgccgggcgttcgccgaggttagctgaaagaccgcgaatggcgaggttcatttttgccagtttatacgtcgtggctgtcagttcctgaccatacagcgcgatatcacggcttttaccctgatggctctcgacgaacttcaccgactgcacgaacatccctgccgagccgcagcacgggtcataaattttgccctggaagggttcgagcatttcagttaacagcgtgaccacacatttgggcgtgtagaactctccaccgcctttgccttcggttgcggcaaacttaccgaggaagtattcgtaaacgcgtccgaccaggtcttctttcgacaacgtttcaacgtcagtttcgtgtgccagcgtttcgatgttgtcgatggtatcaatcagtgacgccagttttttggtttccagattctgacggctgaagtagttgtctggcagcgcgcctttcagggttgggttacgtttctcaattgtcgagagggcggtgtcaatacgaaccgcaatatcgtcctgtttggcattttgtttgataaacgaccagcgcgcctcttccggcaggtagaaaatgttgtcctgctggtagaacacttccatctcaaggaagtcagcttgcccatcggcaatcatttttttgcggcgtgcttcaaacttatcgctgatgaatttcaggaacacgaggcttaacaccacgtgcttgtattcggaggactcaacgctaccgcgaagttggtttgcggtatcccataatgtttcttcaaagcctttttttgctttggcttttttagttggtgctttggccatgatgaactctgttcagataaattgggtcgctattgtaatggttgaggcggcggatttcgccctttaatccatctccagctcatcaaacaactgcaaatccacatccagcaattccactgcattgctgcggcgaatgccgacgttattttcgattaacagttccagtaagcgatcgccgtcgataagcgtaatgggcgcggcccccggaaagagcgccgcttctgcacatttcgctgcaaatttcccggtggtgatgagcgtaccgcgaatggccttgtggtaaggcaacgctccgcgcaactggtcgatatacggtcgagtgatggtgttctgcattcttttgacctgcaccacttcggtaatagtggtgatgccgacctgcacctgaccaatcacgtccacacctttatcgcctgaggctttggtcacttcgacctgctcgtagcccattgcttccagtaattgaccgaccagttgttcaaatttgtacgggttcattgtgctgatttgttcgcgcagcagctctttttgctgctcgttgtagcgtttcaccgcttccagcagctctttacgcggatcgctttttcgtgctggcaacgcttttccaagccaggcgcgtccggtatcggtgatgcaatagctcataccttcgcgagtaaccatgccacggtcaataaggttatagagacgggagtagagcgtgcttttcactgaacttgcagacgcgaatttcgaatgctgatgcaaaaaggcctgccattccggcaataaatcggcgcggcgcgacatttctcggccagccagcagctcaagcagttgcagaatgccttcctggtcatccagtgaacgcagcgttttttcgtcatcttgcaggaatttttgcccgcgcgaggtgggctgccaggtatcatctggcgtgctttccatcagctcaaactggggatagttgaggaataagtagcagccgtagctgtggcgcgggttcaatatgtgattatctgtatcccaaatacgacgggcgatgtcggcatcttcgcccgttaagcgttcgctgatccacaggtcaggttccgaccagtcaacgggtttttgcggcgtaccggtttgatcgcgaatggcggtaatcatattgcgtaccgctttcagggaatagcctgagacggctttcatcatagctttaacctgtgcataggtaggaaaaagcggggtaataactttatagtttttcacggtaatcccttaacgacagcgaggtgtttagtgtgccatgtcaggcgagaaattctattggatgaatcaagtccaacttactcattgtcaatttcatggttgattatccaaaacgtgatgctatttccaacatcaacgctataattgcagaataattgtagatacatttttgtatatacaattagggatggcaactatgccaatggagtttgaatgggatgcaaacaaggccaaaagtaatcgggtgaaacatggcatccgctttgaagatgcggtgttagtgtttgatgatccacaacatttgtcacagcaagatcgcatagaaaacggtgagtatcgctggcagactatcggcctggttcacggtatcgtggttattctggttgcgcataccatccgtttcgaaagcggaaatgaaattattcgaatcatcagtgcacgaaaagcagatcgtaaagagaggagccgctatgagcatggttaaacataaacgagggacaccctctacactcgatgtgcagcatgaggccgaactgaaggcactggcgaataaattcgacgaagatattgattacagtgatatcccgccttccagcgatgagcaatggtctaacgcagaacgcggtaagttttatcggccattgaaaacccaggcttcggtgcgtattgatgctgatgtgatggaatggctgaagcgacctggtaaaggctatcaaactcgcctgaacgcaattttacgtgaagcgatgctgcgcgatcagaacaaaaaataattcaggccgccacatggcggccatcatccataattacttcctcaaccccgcaaacgccgcccgaatctcttcctccggcaactgaatcccgataaacaccatcgtgctatgcggtttttcatcgccccacgggcggtcccagtcggcgctgtagaggcgctggacgccctggaacagcaggcggttaggttcgccgtcaatccacagcatccctttgtaacgcagcagtttatccgccgattccagcagcaggttttccatcacccgggaaacttcgctgatatctaccgggtaatccagttccaccacaatcgacgaaatatcgttttgtttatccgcgataaagtggaaacgcggtttggtgctgatgacgttctcttccagcataaaaccgttggtgttgaacagcaggcccaggtcgatgtcgccgtgggtgacggtgtagaccggtgcacgggcgttgatgcgcgccaggcgttcacgcagtttttctgcttcgcctgcgacgtcggttttagtcagcagaatacggtcggcgtagcccacttgtgactgggcgatggtgaactggttcatctgctcatcggcatgtaccgcatccaccagcgcaatcacgccgtccagcaggtaacgctggcataaaatctcatgggagaaaaaggtctgaataatcgggccgggatcggccatgccggtgcattcaatgaccagacggtcgaactgaatattgcccttgtcgagattatccagcaggtcgagtagtgcgtcttccagctcgttggagcgcgaacagcagatgcagccgttggtcagcgttttgatctgcgtggcgcggtcgccaatcagttgatcatcaacggagacttcgccgaattcgttttcaatcacggcaatcttgtagccgtgttgttcgttaagaatatggcgcagcagggtggttttgcctgcgcctaaaaaaccggtgagtagggtaactgcaatcgggttcatgctctctccattaacaacagcgcataccgcctttaccatcgccgccgtagcgcgcattctggcgttcgcggaagaattcttcatagctcatgtacggcttgtcgggatggttggtcttcatatgctcgacgtagttgtcgtagtctggaatgccaatcaacatcttcgccgcctggccgagatatttttttgcctgtcctaagttaccaaacatagttcactctgataagaacaaagccccgccgaagcggggctaaacacggttagtggtgcgaagagatcttcacgccgccttccgggattggaacgtacggtgtttctttgtcagtacgtttgtcgctgttacgcaccgcaagccacgttttgaaaccgtagaagatgatgctgtacaccacaatcaggaacagaatactcaggcccgcgttggtgtagttgttcacaacgatgtggttcatgttggcaatctgctgcgccgtcaggtcagtaccgttagcaatcttctctttgtactggcttgccatgtagaagaagccttccatctgcgggttggtgctgaacagtttcaggcccagcgcccaggtggtgcagataagcagccatacagccggaacaacagttacccagatgtattgggtgcgcttcatcttaatcagcacaacggtgcccagtaccagcgctacggctgccagcatctggttggaaataccgaacagcggccacaggctcttaacgccgcccagcggatcgaccacgccctgatacagcaggtagccccacagacccacacagcccgcagtaccgatgataccggcaaccagagagtcggtttttttcaggaacgggatgaagttacccagcaggtcttgcagcataaagcggccagaacgggtacccgcatccagcgcggtcaggatgaacagtgcttcgaacagaataccgaagtgataccagaagcccatgtcagccatcggcagcactttgtggaacacgtgagcgatacctaccgccagcgtcggcgcaccacctgcacggttcaggacagaaggctcaccaatgtctttcgcggtttgcaggatctgctctggcgaaatcacgaagccccaggagctgacggtcgctgccgcgtgtgcggtaacgtctttcagctgcgccatgatgatcggcgcgttctcgccacccatttcatgcaggttaggcatggtgatgccaaggccagcaggcggggtgttcatcgcgaagtaaagacccggttcgatgatggacgcagcaaccagcgccataatcgccacgaaggactccatcagcattgcgccgtagccgatgaaacgcgcgtcggtttcattagccagcagttttggcgtcgtaccggaagagatcagcgcgtggaagccagataccgcaccacaggcgatggtgatgaacaggaacgggaacagagcgcctttccacagcgggccagtaccgtcaatgtactgggtcatggcaggcattttcagttccgggttcagcaccacgatacccagcgccaggccgacgataacgccgattttcaggaaggttgccagatagtcgcgcggtgcgaggatcagccacaccggcagcagtgcggaaacaaacgcatagccaatcagcgcgaaggtaatggtggtgtctttaaaggtcagtgccggaccccagtacggatcgtgagcaatcacgccaccgaagtagatagaggcaaccagcagcacgataccaatgacagagacttcacccacacgccccggacgaataaagcgcatgtagatacccataaacagcgcaatcggtacggttgagcaaacggtgaagacaccccacggactttcggccagggctttaaccacaatcagcgccaggacggcgaggatgatgatcatgattaagaaacagccaaacagcgcgatagtccccggtactggtcccatctcttctttgatcatctcaccaagagatgcgccattacggcgagaggagataaacagcaccataaagtcctgaaccgcaccggccagcacgacccccgccagcagccacagcgtgccaggcaggtagcccatctgcgcggcgagaaccggacccaccagcggaccagcaccggcgatagcggcgaagtggtgaccaaacaacacgtaacggttggtcggaacgtagttcagaccgtcgttgttaataaccgcaggcgtcgcgcgcgtggggtcgagtttcatcaccttctgggcgatgtacagactgtagtagcgatacgccaccagatacaccgatacagaggcgaccacgatccacagggcgctgacgtgctccccccgacgtaatgcaactaccgcgaggcagaatgcaccgatgattccgagaatcacccagggtatgtgcttgaatatctttttagtatccatagtaaaacctggcatgtattgattaatagttggccgaagccgttctaggtttgcgttgcgtttgaggaggtaaattgaccgctatcctgtagtgatgttgccagagttacgcgcgcgtaaagtaaggtaaataactgagtggttattttagggatgtaagcggtcagttttgcggttgagcggcaaaggcgtcgtttaagtgacgataaatatgtgattcatatcacatatttatattgtgaataatttatgtaaataatggctttttaaattcagagtgtgaataaaattactcggcgtaatctccgcgggatattcataaagtttttcctttccaggccgaaaatcttgcatcggtccacaggaaagagaaaccatgttaaaacgtatcaaaattgtgaccagcttactgctggttttggccgtttttggccttttacaactgacatcaggcggtctgttctttaatgccttaaagaatgacaaagaaaatttcactgttttacaaaccattcgccagcagcaatccacgctgaatggcagctgggtcgcgttgttgcagacgcgtaacaccctcaaccgcgcgggtatccgctacatgatggatcagaataatattggtagcggttcaaccgttgctgagctgatgcagagtgccagtatttcgctgaaacaggcggaaaaaaactgggcggattacgaagcgttgccgcgtgacccgcgtcagagcaccgccgcagcggcagagatcaaacgtaattacgatatttatcacaatgcgctggcggagctgatccaactgttaggtgcaggcaaaatcaacgagttctttgatcagccgactcagggatatcaggacggtttcgagaagcagtatgtggcttacatggaacaaaacgatcggctccatgatatcgccgtcagcgataacaatgcctcctacagccaggcgatgtggattctggtgggcgtgatgatcgtcgtactggcggtcatcttcgccgtctggttcggtattaaagcctcgctggtagcgccaatgaatcgcctgattgacagcattcgtcatattgcaggcggcgatctggtgaaaccgattgaggtggatggctctaatgagatggggcaactggcagagagtttgcgccatatgcagggagagctgatgcgtaccgtcggtgatgtgcgcaacggggccaatgccatctatagcggtgccagcgaaatcgctaccggcaataacgatctctcttcgcgcaccgagcaacaggctgcttcgctggaagagacggcagccagcatggagcaactgaccgcaacggtgaaacagaacgccgagaatgcgcgccaggccagccacctggcgttaagtgcttctgaaacggcgcaacgcggcggcaaagtggtagataacgtggtgcagactatgcgtgatatctccaccagttcgcagaaaatcgccgatattatcagcgtaattgacggcattgccttccagaccaatattctggctttgaacgcggcggttgaagcagcgcgtgcgggtgagcaaggacgtggttttgcggtggttgcgggagaagtgcgtaatctggcccagcgtagcgcccaggcggctcgtgaaattaaaagcctgattgaagactcggtggggaaagtggatgttggctctacgctggtcgaaagcgccggggaaacaatggcggagattgtcagtgctgtgacccgcgtgacggacattatgggcgaaattgcttctgcttctgatgagcagagccgtggtatcgatcaggttggcttagcggttgctgagatggaccgggtaactcaacagaacgccgcgctggtggaagaatctgccgccgccgccgccgcgctggaagagcaggccagtcgcctgaccgaagcagtggcagtgttccggattcagcaacagcagcaacagcagcgtgaaacatcggctgtggtaaaaaccgtgatgccagctgcgccgcgtaaaatggccgtggcagatagcggtgagaactgggaaacgttttaatcgccataaaaatgcccgataagcaaaatgttatcgggcatagggagattaatctttccgtgggtcgttgatcggctgacgaaccaggaagatgtacgccagtgcccccgctgcggtgacgcaaccgcagatgattagtgccagacggaatgagtgggtggtatcaacaataaaaccagtaatgatcggcgcaaaagaggcgcagatgaagctggcaaagttctggatactgcccaccgacgcagtcatgcgagaagcaactgcgacgtggatcaagccccagcaggatgttccggcaaagtgaatacagaacagtgccataccaatcagcagaaccgctgtcatggatgttgtcgcttgcggtacgaccagcgtaaaggcggcagaacagaacatcccggcaataatgcagatcttacggcttttaatcggagccattccccctttgaccagccagtcagtaacgtaaccgttgaccagcatcccggcagccccaaacaggaaagggatagccgccatcaaccctgtgctttttaaatccaggttataggctgtttgcaggtaaccaggaagccaggccagatacagccacgcagtgtagttgatgccactgaatccgagcatcattccccacattgtgcggttacggaacaagctgcgccattcggcaaaactgagcggatctcggcgggcattgacgctacctgcattgagataagcttgttcaacggcagtcagttctacgtgctcgcggttgcgatagagcatataccagccgatggcgagaaaaatccccagtacaccaatggtaataaacatcccgcgccagcccatcaccagcatcatcgccgccagaatcggtgggcttacggcaacgccaatggtagaagctgcgttgaagaagcccatcgggcgtccgcgctctttgatgttgaaccagtcgttaatgacttttacaccgcatgggttcatcggcgcttcaccaattcccataccgatacgcaccaacacgaactgcgtaaagctgtgcaccatgccagacattgcctggaacagtgaccagaagaacatccccagtcccaacatcaggcgcgggcctttacgatccaatagtgggccgcaaggaagttgcgcaatcccgtaagcgagtgaaaacacggagagcaaagcgccgatttcggtggcacttaatcccaattcttcacgaatcgttaaatttgctaccgacagcgaactgcggtcgagataattgattaccgccgcaaaaaataataacaacatggcggtggtttgaatgcgtttaattcgggtactgcgttgaactaatccatctggtggcacgggaatatctgccgacgaagatggagtaaatgaagaacgcggatcgagggtgatattttctttttccacgccggactcctgtatttataattttaattgtttacgtaattgtgcattacgcaaggttgacattaacggcaggttaaagttttaggactttactaccgctcacaaaaaaacatttttagtcgactgattgtgagcataggtaagcgggaattttccggtatttatcttttgataaaaccgtgcacccgctaatagtttgctgtttttaatccgtacttaatgagcataacgcatgttctcattaatggatcgaatcattgattgtttagctgaattcaaatggttacggagcgcaagggtggcatcaaggtcactgcggcaaatcagagcgctgagaatggtcatatgctcatcgacggcaatgatattgcgctgtttaagatcgctttcgtcccattgatagtgaaaatgaaagatgactgatatgatctcaagcgattgttcaaaaaagatattgtcggcagctgaaagcagtaaggagtgaaaatctctgtcaagttgcgagaacatgcgaaagctattgccgatgttgtcacgcagtagcctgtgacgttcgagcatggttttcgcctgcagccagcggggatcatgatcaggcaggttgagaaagtgctgaagtgaatgtgtttcgagcatttcgcgtagctcaaacagctgctcggcgtaggattgatcgaattgcttcatgctccactggccgcgcttttcgctttgaataagattataacggccgaattttaaaagatattctcttacaaccaccgggctgacacccgcggcccgagccagttgcagttcagaaaaagtttcccctgggcgtaactggcgctggtttatcatcgtgaaaaaagcctgctcaaacactttgttttgttcactcattgaagcggtagtacaggcgaaaccgtcatcatggtcaggtttacgcgcaataacatagtcgtttccaacctgcgttaagacgccgcattcgcgtaagtggctgagaatatgacgcactgtagtgcggctgatgttgtacatttccgccagcgcactttgcgatggaagtggggaagggatatgaccccgcgccatatcatcaatgacctggttaatcacattgtggcgtaaattttgtgaacgactcatattttcctccttgtgagtccattaaaacccgatttaaaacatttttatgcgcgtgttttcacaaaacagattttccgttccgctgccatttttcattttcattgatatctaaggcaacaaaaaatggagagccgaatcatgtctacgatgaatgttttaatttgccagcagccgaaagaattagtctggaaacaacgcgagattcctattccgggtgacaatgaagcattaataaaaattaagtctgtcgggatttgcggtaccgatattcatgcctggggtggaaatcaaccattttttagttatccacgggttttaggccatgaaatatgtggggaggttgttgggctgggtaaaaatgttgctgatcttaaaaatggtcagcaagttgctgtgatcccttatgttgcctgtcagcaatgcccggcgtgtaaaagcgggcgtaccaattgctgtgaaaaaatttcagtcattggcgtgcatcaggatggcggttttagtgagtatttgagcgtgccggtggcgaacattttgcccgcagacggtattgacccgcaggcggccgcattgattgaacctttcgctattagcgctcatgcggtgcgtcgcgcagccattgctcccggcgagcaggtgctggtggtcggagcggggccaatcggtctgggcgcggcggcaatcgctaaagccgatggcgcacaggtggtggtggcggataccagtccggcgcgccgtgaacatgtggcaacgcgtctggagttgcccgtgctggacccgtcagccgaagattttgacgcgcagctgcgggcgcagtttggtggttcgctggcgcagaaagtgatcgacgcgacaggtaatcaacatgcgatgaataacaccgtgaatctgattcgtcacggcggcacggtggtatttgtcggcctgtttaaaggtgagttgcagttctccgatccggaattccataaaaaagaaacgacgatgatgggcagccgcaacgccacgccggaagatttcgctaaagtcggtcgacttatggcggaagggaaaatcactgccgacatgatgttaacccatcgctatccgttcgccacgctggcagaaacctacgagcgcgatgtgattaacaatcgtgagttaattaaaggcgtaattactttctgataaggcgagattattaaagttgccatgcagcgtccggggaagtgttgggcgctgttttttttctgtttctcaatgatgttttgtaggccggagaaggtgtgtaggtcgcaccttatgcgacctacacatcagtcaggaattacccttcacgttccacaactttaatttccaccatgccgatcccgagcttacgcggcgagtgtccgaggatattcccttcgttggttgagacaggttccggcggcacaattaccagtgtgtcggcatcggttgggttatcgaaatgcagtgtggtggtggtcacttcattgcccagcacaagagtttgttcttcattgcctacgcgtaccggaataggacggctggcgttattgccgtatgctttggcggtaatcaccaggtcaaatttcttcggcagcggatgcttgtactcgatttttacttcatcgcccagctgcgcgttggaccagcggccccacgactccggacgggaaatcccgctaaactgtttcacctcttctggcgcaccggcgacgttaaagatgaaactgtcggctttgtagcgaatatcgttatcaacaatcttcagcgtatcgacattgcctttgtaacgcgccatgtcgatgaccgtatctttaaatgccgtcttgctcttccatgttgttttgtcaacatgctggacaatttgctgaccgccaagctgcccctgcgagacacaccagtcggtggaaagtgccagttccggagcccagagttgtgccatcttatagcaacggtcaacccagacgaaattgtcgcgtggagcgaaatcggccagctggaaacgcagcggtgctgagtattcgctttccggcagcggttccacgcgtttgtctgaaacccgcaacagcagcggcaaacggaaatggctacccgagaaggcaatcatgtttttctgctggtcgatggtgaactctttcatctctttagggaatttccacaggcggatgatatctggcttccacgtcaatgttttctctttgatattgaggaagatttccgacatcgactgcccggataaactgctacgaccaagtccgagatagttatcgccaccgagaatgtccagcaccgtcgcgccgttatccatcgtgttacgcttcactgccagcgtctcttgctgcggcttgtcgccacgaatgacaaaaaacaggttattgcgatcctgcttattgaggtatttccacgccgtgttgttcatcgctaaatggtcagaagagacgacgatgacagtatctttaaaccacggtgacgctttgattttgttgataaacgtcgcgatattctcctggctgcaacttaccgcgctgaatgactgattcggtttaccgtcaaaatcatattttttgcggttacaggtacgagaaataaaaccatccgggtgatgggtatcgactgtcagggtaaacagtgagaatcgctgacctgagcgggaaagctcttcaaactttttccacgcttcatcgagaacggtatcgtcgtagaatccccagtcgttgcgatagtgcgggtcggctaccacgcttttcagctcttctgagccgtataagtggtcgaagccgtgcgatttcaggaacacatctttaccggcaaaacgcagatttgcgccctgcacgaaatagttctgataacccgagtttttcaggatatcgcccagacagatgttctgcgggaagaagctggagacagaggcggaggcgttgccttcaaagggggcaaacagcggtatgccgcactgagaagccaccatgcccgcaatcgtgtaatccgttcctggcagctgctgcgtgtggctgaaatccaggccttcatttttcaacgcgcccagttcaggcgtgagatccgggaaagcctcgttatcaaaataggttcgctcgagactttcgccatagatataaaccaggttgagtttcgggtcagggatagttttcgacggctctttataataagccgcaaagtccgggtcgccatcgcgtgactgggatttcaccagttccgttatctgacgaaatgccgggctggcgtccaccgaacccagcgccagtaagagcgccagcaggctgtaaccaaaatggtgcggatgatggcgacgacggcgcaggatccagcccagcgcaccgaacaccgctgtcagccccagcacaatgccgatacccggcaggatgtatttgctgacgccagcaccggtcaggctgttggttaaggtatagagaaccgcgtcgttaataccatcgccagtaaaatagtcgctggcaaacagggtgatatttaaaacgacaaatagccccagcactgttaatgtggctgcaaaccaccaggtgttacgtcccgctttccatgcgtaaatcagcacagaggcgagaaaaagggcgaaagagagtagttctgacaacgggcgatcctcactaaaccgggccgtttagccaacgtttaagctttttgagaagcacaatgtaatggcgtcgccatattgctgcaattctagtgtcaaaaaaatgcgatgttgttaggaattagtttataaacagacttttttgatcgcggtcgcttcccgtgtaacagggggaaaaccgtccaggagcagggaaaagggcaggagagagccgcgtcagccgggtaacagctaaaacgcggcgtttcgcggttcaggaaatgaagttcagcccctgctttaacaccagatcgcaggctttggttttcaccttttctgccagcggagtcgttccgatgttatccagattgagttgctgaccatctttggttttcagcaaaccctgaatgccatccagatagttggtgtcttctttttgctcttcactgttcaggcccagcttttccagcacctggttcttgatgttttcggcatcggttaccgaagccagcttttgcttcgcgcagtattgcagaatgcctgcggcgttgttcatgttatctgcgcttaaggcctggttcccgctgctaagcaagttagttaatgacgcgagcgaccaaccgccttcctgtgtcgtgctgttttggttgccaagttcgctggcggagctggagagcgcatctttccaggacgcagcatgcaccccggtggaaattaatgcgctggcggcaatggcacagcacagaagatgtttaacagttttcatcatcattactcaaggtggaattgtgtcgcagtataccgccagaaacggggattaatactctttacctgttacacggctacggtagctatcccagttgaagatcacccacaaactgttacccaggcgcatacggtccatcacgcgttcgcccagcaacttggtcatctcttccatattactgttggtcagcatcccggttgggcgtttggaagaagagcggcgatcgacgatctggttgatgatcactttttcgtatttcgattcggtctgcacgccgatctcatcgatcaccagcagatcaacgttgctcagatcgttaagcagttgttcttcgctggtaccgctattcctgaaggtatctttcatcgccgacataatatcggccacggtgatgatcaatacggatttaccgcgtagcagcagctcgttgcagattgccgccgccagatggtttttgccggttcctggcttaccagaaaagatgaagctggcgatgttgccgtcaaactcttcgacatactggcgcgctttgcttaacgcattcatctgcccttcacactcaacgcgatagttctcaaaggagcagttctgatgcagtggacgaataccggagcggttaaaggtgcgctgcattttcatcgcccgattttcacgttcgagagcggcggagcggatcgccccttgttctttctgccaggccagtagctcttcacccgttttgaatgcaggtttgatatgggcaggcatcattttttgcaggcgttgcatcaggtcgccaacgtttttcatcgttaccctctgaatcctggtggaatttggctgtcaggttcgctgaccgtattcacatctcgtttcggcagtccgccgttgctggcacgaccgatttgcaggctgcgcgccagtttttgttgccactgcacatggtgaaagactttaccttccgcctgccagtaggcaatgaatgaggccagttcttcggtggtcaccggctctcttagcgccacgccccatagcgccgccaggcggataaagtcggcatcgggttgccagtccggatacatggcgaatttccccatggggacagcaacgggagcggcttgcggttcctgatagagttgatcgtccagagcgacatcgcttcccggacgcgccagcttttcttccagcgccagcagttcagccaggcgtgcaggcgtgacggcataaaacgccggggcattgttagcaaatacggcaaccacaccgccttcagcttttgccagaacggtttggtgatcgtgtaccagggcgtcaataccaacgacgtccggggtcaaaactctggaagacatactgtttctcaaatatggaacgatgaacgagaagggagataacttttatagtaacacacggaggagaggaggctgtctctcatccgtgtgcttaagcgaggcaattttatacgcgagggcgcttgcggtacaaccataatccaggaatggaaagaccgatggataacgcaccaacaatcgatgaagctgtaagaaagttggttaacagggtaatcatcaacggttcgctgtaacctaactggctgatttttaccgccgaaatcattgcggtataagccgatatgcccgggaacatagggataacggccgccacggtaaacactttcggatgcgccagataccagcgcgaccattgaataccaatggtgccgaccagcatagaagccataaaagttgaccactcaatattcagcccgctggtcattaagatcattcgtgaaccatggccaatcgcgccaagcagcgcacaccagcgtaacgcccgcacgggaacgttgaacaccatcgcaaagccgaccgctggaatggcggcgaggatcatatcctgcgccaatgcaaacagaaactcgatcacacccatccgcgtagcccccaaatcgtcagtgccatcaccacgccgacgcaggtagccagcgtcagcagactggcgatcgcccagcgtgccagtccggtattgatgtggcctttaaacatatcggcgacggcattaatcaacggaaagcccggcaccagcagcagaacgctggcggccatcgcaatggtgggtgtatcgctgaaagtggggagttgcaaaagcaatccggaaatggtggtggcggcgaaagcggtaaggcaaaagttgatctgtggatgaagatgacgttgtgccagcagctggcggatatacatcgcggtcgtactggcaaagaaggtgatgacggcaccatcccagccaccgttattgagtttacagaaacaggcgcaagaaaggccaaccattaaggctaccagccatcttgggtaacgtaatggctgaatttggctaaatcgtttctctacgcctttgtaatccagcagatgatgctccgcaagaatcacaatgtgctggacttcagtcaccacatgcatattaatgccgcgatcgtgattttttcgtgtcgatgtcaggcattgcccatctttaatagttgtcagcactatggcgttcgaagagatagaactttcgacgctgtccattcccaacgcccgacccagtcgtgaggaaagctcatcaaccaacgcgctttccgcaccatgttgcaaaagaaataatccacactggatacaaagccgcgttacggctcgctgttgctcagtttgcataactcgccctttgtcatagacgtgctgcgtattgttcagataatgagaatccatttgtatcatgaagcacggttgttttgaggtaggttaagatcaaaattgcgctgattaatcctggttatcgggacaagctcggtgataaaaagcgaattatctctcgccgcaaacaaactatcacatgaatattatcactataatgaatttattgttttagcctttacgggtcaggataatagatagctgggcgcgttttttagtgttaacaagttaaaatcatcagattttattgaataaatattgattgtgtgattcccgcattctgcgggaagggatatcatttaatttataattaaatgaatgtgatttctgtttttcattaagtattcctaacaacttaatgtagatattttaaatgtctccaggctatttcaccaggttatcatttgatgctaaccttctgacacatgcagtggagttgttgtgcagcaggagtatgctgatatgaaagtgaatgctaaggataatttattcgcttaatctattaatttgctggaaacatttaaggaatgaatatcctgaataaaccatcataatttttagacagtggatgtggaggaaatatgttgccaggatgctgcaaaaatggaattgttatcagtaaaatacctgttatgcaagcagggttaaaagaggtcatgaggactcacttccctgaatatgaaataatatccagcgcctctgcggaggaccttaccttattacaattacgtcgttccggattagtcattgctgatttagccggtgaaagtgaagatccacgttctgtttgtgaacattattattctttaatctcacaatatcgggaaattcactgggttttcatggtgtcacgctcctggtattcccaggcagtagaactgctcatgtgccctacggcgacgttattgtctgatgttgaacccattgagaatctggtcaagaccgtacgttccggcaatacgcacgcagagcgtatcagcgccatgctgacctctccggcaatgactgaaactcatgattttagctatcgctccgtcattctcactctttcagagcgcaaggtactgcggctattaggtaaaggatggggcatcaaccagatagcttcattgcttaagaaaagtaataaaactatcagcgcccaaaaaaacagtgcgatgcgtcgactggcaattcacagcaacgctgaaatgtatgcatggataaatagcgcgcagggtgcaagagaacttaacttgccttctgtttatggagatgccgcagaatggaacacagccgaattaagaagagaaatgtcgcactcatagaaaaatgcgtcatgagtagtatcggtattgagagtttattcagaaagtttgcgggcaacccttataagctccatacctataccagtcaggagtcatttcaggatgccatgtcgcggatctcgtttgcggcggtcattttttctttttctgccatgagaagtgagcgcagagagggattatcttgcctgactgaactggcgattaagtttccgcgtacccggcgtttagttattgcggatgatgatattgaagctcagctgattggttcattgtcgccatcaccgctggacggtgtattaagtaaagcgtcaacgctggagatttttcatcaggaactctttttgtcattaaatggtgtacgtcaggcgaccgaccgactgaacaatcagtggtacattaaccaaagccggacgctaagcccgacggagagagaaatattgcgctttatgtcgcgtggctactcaatgacacaaattgccgagcagcttaaacgcaatatcaaaacgatccgcgcgcataaatttaatgtgatgtcgaaactgggcgtcagttctgatgcaggattgttggaggccgcagatattctgttatgtatgcggcattgcgaagcaagtaatgtgttgcatccctattaatccgcatgatgccgggtttacttccccggcagtgctttcatttcagcgtacaatcgccacattgctgcacatccggtaagcgataacgctggcagcaagtgcggcgcaccagcaggccgtcgcgcagtaccacggtacgccagagtggattatcttcaccgttcgtgagcgttttctcaaaaaagatggcatggcgcagcgattcaaccgtcgcctcgccgagcagttgcttcatctcagtgagataccagttgatcaaataaccggtattactccagataagtttgccgttgatctctccggtcgcttctagtgcctgcacaaccggaaccagcgcctggctgattaacgtttccattcgctgctgcggcgaatgtggtgttgcgtttttatcgtcacacacatcgacccagaaacaggcggcacggccggtttcgtgaaactcagcatggaaatgttccggcgacacatctaatgctttttcctgcgtcagtagcgccagcattaatggtggcaccatcaggccgatataccattgtgcccatagtgagatcagcggtttgttctcgcggatcatcgttggttggttgcgatagatatgatcggaatagaccgcgagtagagaacttagcgcattcggtgatgaccattgcgccagcgtcatggcgttaagcggagcgggttcatccaggcggataaactcgagcaaatgttcacgatgtttggcgatcgtcgcacgtacggcttgtgcaagcccagcatcctgtggctggagatgcgttcgccagataacatcttcatagagcggtgcggaacgataggccataatcgggatagtaatctaaatgataatgattgctaatcctagcgataggtttatccgatagcaagggatttctctggcttgcaaatgataaaaattatcatatgatattggttatcattatcaatgaaagagatgaaaccatgttgcaacgtacgctgggcagtggctggggagtgttgctgccaggattgctgattgcagggctgatgtatgcggatttatcgcctgatcaatggcggattgtcattctgatgggattagtattgacgccggtgatgctgtatcacaaacagttacggcattacgttttgctaccatcgtgcctggcgcttattgctggcatcatgctgatgataatgaatttgaatcagggatgaaaaatcaaggaagaaacaagaaaggaagtaaagataattggtgcgaggggggggacttgaacccccacgtccgtaagaacactaacacctgaagctagcgcgtctaccaattccgccaccttcgcacagtcatcttactttttttgatatcgcctcgtttggtgcgaggggggggacttgaacccccacgtccgtaagaacactaacacctgaagctagcgcgtctaccaattccgccaccttcgcccagtgcgagcaatatcaacgtggtttttggtgcgaggggggggacttgaacccccacgtccgtaaggacactaacacctgaagctagcgcgtctaccaattccgccaccttcgcataccatcaattcttaaaaagaattgctaccacggaggcgcattctagtggttttcagcttttcgtcaatagttaattatcggcagatgtgtaattgctggaaaaatgtccatcaggagactaacgagcaggttttgtaggtcggataaggcgttcacgccgcatccgacacggtattcgggggcagatgccagatgccacgctggcgcgtcttatctggcctacgaaggattaatgtgcagttgtataaggcgagcacgccgcatccgacaaggcttgcggcgggatactcaacctttcttcgcctggcgggtcataatggcgcgatacaccttgaagcgcccggtttgcgcgataacttcatggaagccaaatgtctcatccagcacgtccgggtaaggcaggaaggcgttcgctacaattcgcagctcgccgccgctattaagatgacgcaccgcgccgcgaatcagcgtttgcgccgcatccaggctggtttgcatcccatcgtggaacggcgggttggagatgatcatatcaaaacgacctttcacctcggaaaagacgttgctggcaaagacttcaccttcaacaccgttggccgcaagcgtcgcacggctggcttctaccgccggggcagagacatcgcacaaggtgagacgaattttcggtgaatggcgcgcaaaggcaactgaaagcacacccgcgccacagccgacatccagcactttacctttcgtgtgcggggttaacgtcgagagtagcaactggctaccgacatccagaccgtcgcggctaaacacgccaggcagcgttttgaccgtcaggccatcgacgctgtattcgccccagaatttatcggcatcaaataccggctgtttttccagacgaccaaaatagaggccacagcgacgagcgctgtcgactttattcaacggcgcataatctgccagcatctgctcggcgctgcgcacgccgctgcggttctcgccaacgacaaaaatatccgtccccaccggcagcagagaaagtaaattcatcaactggaactgggcttccggtttgttcttcggccagtagtaaatcagcgtatcgcaatctgcgacgtcatccgccgtggcgaccagactgaaacgggcgttatcccccatctggcggcttaatacctgccagtggtggaattgctgggtatgagcacggctggccgcggtatctaaacgcgcgggcaggtcatcctgtaagtctccggcaaacagaatacggctttgttcgaaatcatcactgtgacgcagcaagacttcacttgccggggtaaatgcagacatggaatgctcctcaattgatactggcggcgattatagccatatgttggcgcggtatcgacgaatttgctatatttgcgcccctgacaacaggagcgattcgctatgacatcccgacgagactggcagttacagcaactgggcattacccagtggtcgctgcgtcgccctggcgcgttgcagggggagattgccattgcgatcccggcacacgtccgtctggtgatggtggcaaacgatcttcccgccctgactgatcctttagtgagcgatgttctgcgcgcattaaccgtcagccccgatcaagtgctgcaactgacgccagaaaaaatcgcgatgctgccgcaaggcagtcgctgcaacagctggcggttgggtactgacgaaccgctatcactggaaggcgctcaggtggcatcaccggcgctcaccgaattacgggcaaacccaacggcacgcgccgcgttatggcaacaaatttgcacatatgaacacgatttcttccctcgaaacgactgatttaccagcggcttaccacattgaacaacgcgcccacgcctttccgtggagtgaaaaaacctttgccagcaaccagggcgagcgttatctcaactttcagttaacgcaaaacggcaaaatggcggcgtttgcgattacgcaagtggtgctggatgaagctacattgttcaatattgcggtcgatcctgactatcagcgtcagggattgggaagggcgctgctggaacatctgatcgacgaactggaaaaacgcggcgtggcgacactatggctggaagtccgtgcttcaaacgctgccgccattgccctgtacgaaagtttaggctttaacgaggcgacgattcgccgcaattactaccccaccacggacggtcgcgaagacgccatcatcatggcgttgccaatcagtatgtaagacaaggtggaataatgaagtgggactggattttctttgatgccgatgaaacgctgtttacatttgactcattcaccggcctgcagcggatgtttcttgattacagcgtcacctttaccgctgaagattttcaggactatcaggccgttaacaagccactgtgggtggattatcaaaacggcgcgatcacttcattacagcttcagcacgggcgttttgagagctgggccgaacggctgaaagttgaagcaggcttgcttaacgatgcctttattaatgcgatggcggaaatctgcacgccgcttccgggggcggtttccctgcttaacgccattcgtggcaacgctaaaatcggcatcatcaccaacggctttagcgccttgcagcaagtgcgtctggaacgcacgggcctgcgtgattacttcgatttgctggtgatttccgaagaagttggcgttgccaaaccgaataagaaaattttcgattatgcgctggaacaggcgggcaatcctgaccgttcacgcgtgctgatggttggcgacactgccgagtccgatattctcggtggcatcaacgccgggcttgcgacctgctggctgaatgcgcaccatcgcgagcaaccagaaggcatcgcgcccacctggaccgtttcttcgttgcacgaactggagcagctcctgtgtaaacactgattgcctcccccccgttgatgggtaaaatagccgcaatttttcgttttcaacaagcgcggcgcgatgccgcttactcaagaagaaagaattatgacgttgtctccttatttgcaagaggtggcgaagcgccgcacttttgccattatttctcacccggacgccggtaagactaccatcaccgagaaggtgctgctgttcggacaggccattcagaccgccggtacagtaaaaggccgtggttccaaccagcacgctaagtcggactggatggagatggaaaagcagcgtgggatctccattactacgtctgtgatgcagtttccgtatcacgattgcctggttaacctgctcgacaccccggggcacgaagacttctcggaagatacctatcgtaccctgacggcggtggactgctgtctgatggttatcgacgccgcaaaaggtgttgaagatcgtacccgcaagctgatggaagttacccgtctgcgcgacacgccgatcctcacctttatgaacaaacttgaccgtgatatccgcgacccgatggaactgctcgatgaagttgagaacgagctgaaaatcggctgcgcaccgatcacctggccgatcggctgcggcaagctgtttaaaggcgtttaccacctttataaagacgaaacctatctctatcagagcggtaaaggccacaccattcaggaagtccgcattgttaaagggctgaataacccggatctcgatgcagcggtcggtgaagatctggcacagcagctgcgtgacgaactggaactggtgaaaggcgcgtctaatgagttcgacaaagagctgttccttgcgggcgaaatcactccggtattcttcggtactgcgctgggtaacttcggtgtcgatcatatgctggatggcctggtggagtgggctcctgcgccgatgccgcgtcagactgatacccgtaccgtagaggcgagcgaagacaaatttaccggcttcgtatttaaaattcaggccaacatggacccgaaacaccgcgaccgcgtggcgtttatgcgcgtggtatccggtaaatatgaaaaaggcatgaagctgcgccaggtgcgcactgcgaaagatgtggtgatctccgacgcgctgacctttatggcaggtgaccgttcgcacgttgaagaagcatatccgggcgatatcctcggcctgcacaaccacggcaccattcagattggcgacacctttacccagggtgagatgatgaagttcaccggtattccgaacttcgcgccagaactgttccgtcgcatccgcctgaaagatccgctgaagcaaaaacagctgctcaaagggctggtacagctttccgaagagggcgcggtgcaggtgttccgtccaatctccaacaacgatctgatcgttggtgcggttggtgtgctgcagtttgatgtggtggtatcgcgcctgaagagcgaatacaacgttgaagcagtatatgaatcagtcaacgttgccaccgcccgctgggtagaatgtgcagacgcgaagaaattcgaagagttcaagcgtaagaacgaaagccaactggcgcttgatggcggcgataacctcgcttacatcgctaccagcatggtcaacctgcgcctggcgcaggaacgttatccggacgttcagttccaccagacccgcgagcattaattcttgcctccagggcgcggtagccgctgcgccctgtcaatttcccttccttattagccgcttacggaatgttcttaaaacattcacttttgcttatgttttcgatgatattccgagcggtttcaaaattgtgatctatatttaacaaagtaatgacatttctgacggcgttaaataccgttcaatgcgtagatatcagtatctaaagccgtagattgtcattctaccgatattaataactgattcagaggctgtaatggtcgttattcatcacccatcgcttttgtgatggcgaccattgacttctgtagagggtgaagtctctccctattcagcaatgcaacctcgtgttgccaggctcaaattacgagcaaacttacaggaataaatcgatgactatgacaagactgaagatttcgaaaactctgctggctgtaatgttgacctctgccgtcgcgacaggctctgcctacgcggaaaacaacgcgcagactaccaatgaaagcgcagggcaaaaagtcgatagctctatgaataaagtcggtaatttcatggatgacagcgccatcaccgcgaaagtgaaggcggccctggtggatcatgacaacatcaagagcaccgatatctctgtcaaaaccgatcaaaaagtcgtgaccctgagcggtttcgttgaaagccaggctcaggccgaagaggcagtgaaagtggcgaaaggcgttgaaggggtgacctctgtcagcgacaaactgcacgttcgcgacgctaaagaaggctctgtgaagggctacgcgggtgacaccgccaccaccagtgaaatcaaagccaaactgctggcggacgatatcgtcccttcccgtcatgtgaaagttgaaaccaccgacggcgtggttcagctctccggtaccgtcgattcccaggcacagagcgaccgtgctgaaagtatcgccaaagcggtagatggtgtgaaaagcgttaaaaatgatctgaaaactaagtaattcgtcgtaattcgtcctcccgaactttgtcgggaggcgcgatgtgcaccacactaaaaatatcgcattgagtgattttcacgctcatatcaagcggtgacattaactatggtaaaggagacgcttatgtttcgttggggcatcatatttctggttatcgcgttaatcgccgccgcacttgggtttggtggtctggccggtaccgctgcaggcgcagctaaaattgtctttgtcgtcgggattattctgttcctggtgagtttgttcatgggccgaaaacgaccctagatttcagaccattaagaaaattttatccaaagccagtccagcggactggcttttgcggttttagcgaataataaattgcgttactttgtcattctttcacaacaaaaacaggaaggcagaggtggggcagcgaatacctgtaacgcttggtaatattgcgccgttgtcgctaaggccgttccagcctggacgaatagctctggtgtgcgaaggcggcggacagcgtggaattttcacggctggcgtgctggatgagtttatgcgcgcgcagtttaatcctttcgatctttatctcggcacatctgccggggcgcagaacctctcggcgtttatctgcaatcagcccggttacgcgcgcaaagtcatcatgcgctataccacaaaacgcgaatttttcgatccattgcgctttgtccgtggaggaaatcttatcgatctcgactggctggtggaggccaccgcaagccagatgccgttgcaaatggataccgccgcgcggttgtttgacagcggcaaatcgttttatatgtgcgcctgtcgtcaggatgactacgcgcctaattactttttaccaaccaaacaaaactggctggatgtgattcgcgcctccagtgcgatacctggcttttatcgtagcggagtgtcgctggaaggcattaactacctggatggcgggatcagtgatgcgattccggttaaagaggcggcaaggcagggcgctaaaacgttggtcgtcatccgcactgtgccgtcacaaatgtactacacgccgcagtggttcaaacgcatggaacgctggctgggtgacagtagcctgcagccgctggtcaatctggtgcagcatcatgaaaccagctatcgtgacattcagcaatttattgagaaaccaccgggcaagctgcggatattcgaaatttatccaccgaaaccattacatagtatcgcgcttggcagtcggattccggcgctgcgtgaagactataaacttgggcgtttatgcggtcgttatttcctcgccacggttggcaagctattaactgaaaaagcgccgcttacccgccatctggtgccagtggtgacgccggaatcgatcgttattccgcctgcgccagtcgccaacgatacgctggttgccgaagtgagcgatgctccgcaggcgaacgacccgacatttaacaatgaggatctggcttgatttgccgttttatcgatacccactgccattttgatttcccgccgtttagtggcgatgaagaggccagcctgcaacgcgcggcacaagcgggcgtaggcaagatcattgttccggcgacagaggcggaaaattttgcccgcgtgcaggcgttagcggaaaaatatcaaccgctgtatgccgcattggggttgcatccggggatgttggaaaaacatagcgatgtgtctcttgatcagctacagcaggcgctggaaaggcgtccggcgaaggtggtggcggtgggggagatcggtctggatctcttcggcgacgatccgcaatttgagaggcagcagtggttactcgacgaacagctgaaactggcgaaacgctacgatctgccggtgatccttcattcccggcgtacacacgacaaactggcgatgcatcttaaacgtcacgatttaccgtgcactggcgtggttcacggtttttccggcagcctgcaacaggccgagcggtttgtacagctgggctacaaaatcggcgtaggcggtactatcacctatccacgcgccagtaaaacccgcgatgtcatcgcaaaattaccgctggcatcgttgttgctggaaaccgacgcgccggatatgccgctcaacggctttcaggggcagcctaaccgaccggaacaggctgtgcgggtgtttgacgtgctttgcgagttgcgcccggaaccagaagatgagattgccgaagtgttgcttaataatacgtatgcgttgtttagcgttagtgggtagtttacccttcgtaggcagcatccggcagtcggcgcataatgcctgatgcgacgcttgtcgcgtcttatcatgcctacaagtctgtgccgaaccgtaggccgtatccggcatgtcacaaatagagcgccggaaatatcaaccggctcaccccgcgcacctttaacgcatcagccaacggctcaacgtcttccggcgtggcgctcgcccagctttgcgcctcgccatacacgccgtgggcatgaaacgcgttcaggcgtaccggaacatcgccaagtcccttgataaacaccgccagttcttcgatgtgttgcaaataatccacctggccagggattaccagcaaacgcagttccgccagcttaccgcgctctgccagcaaacagatgctgcgcttaatctgctgattatcgcgtccggttaattgttgatgacattcgctcccccacgctttgagatcgagcattgcgccgtcacacaccgggagtaatttttcccagccggtttcgctcaacataccgttactgtccacgaggcaggtgaggtggcgcagttgcggatcgtttttgatggctgtaaacagcgccaccacaaacggcagctgggtcgtggcttcgccgccgcttaccgttatcccttcgataaacagcaccgctttgcggatatggctaagcacctcatccacgctcatggattgcgccattggcgtggcatgttgcggacacatcttcaggcaggtatcacactgctcgcagaccacagcgttccacagcactttgccgtcaacaatctgcaacgcctgatgcggacactgtggcacgcactctccgcaatcattgcagcgtcccatcgtccacggattgtgacagtttttgcagcgcagattgcagccctgcaaaaacagagccagacgactgcctggcccgtcaacgcaggagaaggggataatcttactgactaaagcgcatctgctgttcatggcttatcacgcgcggctggcgttccagaatacgagtgttgcgtgcggcttcttcgcccagccaggtggtgttggtgcgtgaaccttcggcgcgatatttttctaaatccgacaaacgcaccatataaccggtaacgcgaaccagatcgttaccgctgacattggcggtaaattcacgcattccggctttaaaggcaccgaggcaaagctgtaccagtgcctgcgggttacgtttgatggtttcgtcgagggtcagaatgtcgctgatgccggaataataataagcatgatgcggggcgacagtttgcagatgggtgatcggatctggctcatcgccatacggcaaacgcgcgcccggcgtggtgccgatatcggaactgatccccgactgtgcgtgtaacatggcgcgtttttgccagccatatttcacgggggtattggcgacaaactccgccagttgcgcgctgatgcgataacccacttcatttgcggcggcttctttaccgtagcgcgcggcaatcccttctttctcacacagcaagttaaccgcttccgccagcccatacatgccaaacattggcacaaaacgttcagggttaatcagcccttctttcaccaggaagctattctcaaagaagtgtgattgttgatagaggaattcacaccgcgcatcgatgatggcgatctgctgctggcagtagtgcggtagagtgcgcgtaaagaagtcatccagcgattcgctgcgctcggcaatggctttcaggttaaggcgtaccagcgtgctgccaccacccgccagcggcagtgagttgtaacagctcacaatcccgtagcccccttttgtgaaaattttatcatgcaccggaccgttggcgatgtgcggtttgctacattcacagatgttcttcgccacttccagcagcaggtcatcaggggtgatttctggatcgtagataaaggtcaggttcggtgaaacctgcttcaactctgcatctgcacgtaatatcgcacgggtgatgggcgaatcagacgggccgatattggcgtgcataaaggcgtctggcagggttctgtcgaggtaacgccagaaacgttttattcgaatatcgatctcgtcttgtgttagaattctaacatacggttgcaacaacgcatccagttgccccaggtagaccggcatcgatgtgaccgacggtacgtggtggtaaagaatggtcagcagagagagtgcgtcatcaagatctttcgcgccttccagctccagccattcggaaccgttcgccagaaaacgggcgtaatcgggtaagacatagcgcggtttgtacggcgcatgaccttcaaacatatcgcagattacaccctcatccagcgcgcggcgggcctcggcaggcagctgcggataaggcagattgttttctgcttccagtgccagaaaatggcgcttctgctccgggctaagcactgggctggtgacaatttgctggcaacgttgttgcagtgcattttcatcagaagtgggcatcttcttttccttttatgccgaaggtgatgcgccattgtaagaagtttcgtgatgttcactttgatcctgatgcgtttgccaccactgacgcattcatttgaaagtgaattatttgaaccagatcgcattacagtgatgcaaacttgtaagtagatttccttaattgtgatgtatatcgaagtgtgttgcggagtagatgttagaatactaacaaactcgcaaggtgaattttattggcgacaagccaggagaatgaaatgactgatctgaaagcaagcagcctgcgtgcactgaaattgatggacctgaccaccctgaatgacgacgacaccgacgagaaagtaattgctctgtgtcatcaggccaaaaccccggtcggcaataccgccgctatctgtatctatcctcgctttatcccgattgctcgcaaaacgctgaaagagcagggcaccccggaaatccgaatcgctacggtaaccaacttcccacacggtaacgatgacatcgaaatcgcgctggcagaaacccgtgcggcaatcgcctacggtgcagatgaagttgacgttgtgttcccgtaccgcgcgctgatggcgggtaacgagcaggttggttttgacctggtgaaagcctgtaaagaggcttgcgcggcagcgaatgtactgctgaaagtgatcatcgaaaccggcgaactgaaagacgaagcgctgatccgtaaagcgtctgaaatctccatcaaagcgggtgcggacttcatcaaaacctctaccggtaaagtggctgtgaacgcgacgccggaaagcgcgcgcatcatgatggaagtgatccgtgatatgggcgtagaaaaaaccgttggtttcaaaccggcgggcggcgtgcgtactgcggaagatgcgcagaaatatctcgccatcgcagatgaactgttcggtgctgactgggctgatgcgcgtcactaccgctttggtgcttccagcctgctggcaagcctgctgaaagcgctgggccacggcgacggtaagagcgccagcagctactaagtaagatgctttacgcctgatgcgctgcgcttatcaggcctacgagacgtatctacccgtaggccggataaggcgtagacgcatccggcaaaagccgcctcatactcttttcctcgggaggttaccttgtttctcgcacaagaaattattcgtaaaaaacgtgatggtcatgcgctaagcgatgaagaaattcgtttctttatcaacggtattcgcgacaacactatctccgaagggcagattgccgccctcgcgatgaccattttcttccacgatatgacaatgcctgagcgtgtctcgctgaccatggcgatgcgagattcaggaaccgttctcgactggaaaagcctgcatctgaatggcccgattgttgataaacactccaccggcggcgtcggcgatgtgacttcgctgatgttggggccgatggtcgcagcctgcggcggctatattccgatgatctctggtcgcggcctcggtcatactggcggtacgctcgacaaactggaatccatccctggcttcgacattttcccggatgacaaccgtttccgcgaaattattaaagacgtcggcgtggcgattatcggccagaccagctcactggctccggcagataaacgtttctacgcgacccgcgatattaccgcaaccgtggactccatcccgctgatcactgcctcgatcctggcgaagaaactggcggaaggtctggatgcgctggtgatggacgtgaaagtgggtagcggcgcgtttatgccgacctacgaactctctgaagcccttgccgaagcgattgttggcgtggctaacggcgctggcgtgcgcaccaccgcgctgctcaccgacatgaatcaggtactggcctccagtgcaggtaacgcggttgaagttcgtgaagcggtgcagttcctgacgggtgaatatcgtaacccgcgtctgtttgatgtcacgatggcgctgtgcgtggagatgctgatctccggcaaactggcgaaagatgacgccgaagcgcgcgcgaaattgcaggcggtgctggacaacggtaaagcggcagaagtctttggtcgtatggtagcggcacaaaaaggcccgaccgacttcgttgagaactacgcgaagtatctgccgacagcgatgctgacgaaagcagtctatgctgataccgaaggttttgtcagtgaaatggatacccgcgcgctggggatggcagtggttgcaatgggcggcggtcgtcgtcaggcatctgacaccattgattacagcgtcggctttactgatatggcgcgtttgggcgaccaggtagacggtcagcgtccgctggcggttatccacgcgaaagacgaaaacagctggcaggaagcggcgaaagcggtgaaagcggcaattaaacttgccgataaagcaccggaaagcacaccaactgtctatcgccgtatcagcgaataacggtatactgatctgatcatttaaatttgaagcactgagtacggagaacatatgaaacgtgcatttattatggtgctggactcattcggcatcggcgctacagaagatgcagaacgctttggtgacgtcggggctgacaccctgggtcatatcgcagaagcctgtgccaaaggcgaagctgataacggtcgtaaaggcccgctcaatctgccaaatctgacccgtctggggctggcgaaagcacacgaaggttctaccggtttcattccggcgggaatggacggcaacgctgaagttatcggcgcgtacgcatgggcgcacgaaatgtcatccggtaaagataccccgtctggtcactgggaaatcgccggtgtcccggttctgtttgagtggggatatttctccgatcacgaaaacagcttcccgcaagagctgctggataaactggttgaacgcgctaatctgccgggttacctcggtaactgccactcttccggtacggtcattctggatcagctgggcgaagagcacatgaaaaccggcaagccgattttctatacctccgctgactctgtgttccagattgcctgccacgaagaaacctttggcctggataaactctacgaactgtgcgaaatcgcccgtgaagagctgaccaacggcggctacaacatcggtcgtgttatcgctcgtccgtttatcggtgacaaagccggtaacttccagcgtaccggtaaccgtcacgacctggctgttgagccgccagcaccgaccgtgctgcagaaactggttgatgaaaaacacggtcaggtggtttctgtcggtaaaattgcagacatctacgccaactgcggtatcaccaagaaagtgaaagcaactggcctggacgcgctgtttgacgccaccatcaaagagatgaaagaagcgggtgataacaccatcgtcttcaccaacttcgttgacttcgactcttcctggggccaccgtcgcgacgtcgccggttatgctgcgggtctggagctgttcgaccgccgtctgccggagctgatgtctttgctgcgcgatgacgacatcctgatcctcactgctgaccacggttgtgatccgacctggaccggtactgaccacacgcgtgaacacattccggtactggtttacggcccgaaagtaaaaccgggttcactgggtcaccgtgaaaccttcgcggatatcggccagactctggcaaaatattttggtacttctgatatggaatatggcaaagccatgttctgatggatttgggcggagcgttgactccgcctttgttatgtcacaaaaaggataaaacaatggctaccccacacattaatgcagaaatgggcgatttcgctgacgtagttttgatgccaggcgacccgctgcgtgcgaagtatattgctgaaactttccttgaagatgcccgtgaagtgaacaacgttcgcggtatgctgggcttcaccggtacttacaaaggccgcaaaatttccgtaatgggtcacggtatgggtatcccgtcctgctccatctacaccaaagaactgatcaccgatttcggcgtgaagaaaattatccgcgtgggttcctgtggcgcagttctgccgcacgtaaaactacgcgacgtcgttatcggtatgggtgcctgcaccgattccaaagttaaccgcatccgttttaaagaccatgactttgccgctatcgctgactttgacatggtgcgtaacgcggtagacgcggctaaagcactgggcgttgatgctcgcgtgggtaacctgttctccgctgacctgttctactctccggacggcgaaatgttcgacgtgatggaaaaatacggcatcctcggcgtggaaatggaagcggctggtatctacggcgtcgctgcagaatttggcgcgaaagccctgaccatctgcaccgtgtctgaccacatccgcactcacgagcagaccactgccgctgagcgtcagaccaccttcaacgacatgatcaaaatcgcactggaatccgttctgctgggcgataaagagtaattgtgtttcgctgaaaggcgaacgtcgtgttaagccggagcaggagactgctccggctttttagtatctattcatcaatagcaactgatttatagatttactattatttttcatatggatagaaaataaaatccattcaagtatctattcacgaatctattcatttatgttcagccgtcatccaggaagggcatatcagcaactctggtggacaaccataaatttctgccattttgcttttgatgtttgagctaagccgttccgtcttttcgatctgttttagagaattaatcgagatacctaacattttacttacttcagcaagcgataatttatgcctgatacgcacggcggctagccaggaaatacgctggcttaacattaaattgataatctcccgctcctggttttccagatcgatcatattcccttcctttggtattttaatcagcgagttaccttaccgcccccgctatccacgtcgacaactcccgtagctctttttcctggtccgggaagtcaaccaacagcgcttcgcactcttgttgcagcatatccgcgcggtacaggcagccttgcagtcgcccggcgagggcttccagcggcgcggggttgaggctgtcggtaaacacctgggcgcgggtgatatggcctttttcaacgtcgaaatgcagttccacgccgccccagctaaagcgttcatccagcagatgcgagaatgccggagcctgaccgaagttccattcccagctactctgacgggcaaaggtttcggcgaagtttggcaagtctggcgttttgtccggggagatgatttccgcttctacacgctcgccataatgggcgaaaaaggccttggttatgacctcgcaaacctgctcatgggtgatccccggcagcagctcggtgaggttggtcacgcgggaacgcactgaggtaatgcctttcgccgccagtttctttttatccggattgagatagtttgccaggcggctaaggtcggcattgagcagcaaagtgccgtggtggaagccacgatctttggtttcgcgataggccgagcctgagactttgcggtcgccttcgactgttttcaccaccagatcgttacgcccggacgcttcggcgctgacgccgagcgcgttcagcgcattgagcacaatcgacgtagagatggttttatcgtactccggcttgccagccataaaggtaaagcaggtattgccgagatcgtggaacaccgcgccgccaccgctactgcgccgcgccaggcggacgttatcttcttccatccgccgggtattacactctttccacgggttctgcgcgcgaccaatcactaccgtgtcggcattgcgccagagaaacagaacgcgctgcgtggcgggcatttggcgaaaaatacactcttccaccgccaggttaaaccacgggtcgtaagagtcagagatgagcaggcgtaatgtggacataacgatttcctttcttgtagtaatgggtcactcttttttctcgctttcttcctcttccggcaccggtttgctggcggttaacaggaagggcgattgctgccagcgggtgcgtttaccctgtagcagcgtgcgggtcagcactacgccgattgccagtgagagcagcaacatcaggcgtaaaatgttagtggtgttatccacctgttgggcttcggtggcgagcgtatgggtgtcgagtgtcaggcgcagatagccgagcggtccgtttttacccgcaattggctcgacaatctgctggttaaaatagccgcctgcttttttaccgtcgagcgccagccggtcgcgcacttcgacgctttcgcctgaacgggcgataagatcgccttgttcgtcatacacacccgcgtcgaggatgcggctttcatccgttaactgatcgaggatcgcctgaatgcgtttttcatctggtgagtcggtacgcatcagcggtgcaacgttcagcgttacctgacgcgccagggtgcgggccagttcttccagctgtggattacgttgtcgctggtggttttgactaaaccatgacgctccctgcatcagcgccactaacaaggcaagacagaacaggacaatcactgcccgatgcagccggaatttcagttttgtgcgagccatcttccaccctttgaaaatttgagacttaatgttgccagaagcaatggatacaaggtagcctcatgcgttattttccctgcttcgaacgattttacaggagccttaatgcctaacattacctggtgcgacctgcctgaagatgtctctttatggccgggtctgcctctttcattaagtggtgatgaagtgatgccactggattaccacgcaggtcgtagcggctggctgctgtatggtcgtgggctggataaacaacgcctgacccaataccagagcaaactgggcgcggcgatggtgattgttgccgcctggtgcgtggaagattatcaggtgattcgtctggcaggttcactcaccgcgcgcgctacgcgcctggcccatgaagcgcaactggatgtcgcgccgctggggaaaatcccgcacctgcgcacgccgggtttgctggtgatggacatggattccaccgccatccagattgaatgtattgatgaaattgccaaactggccggaacgggcgagatggtggcggaggtaaccgaacgggcgatgcgcggcgaactcgattttaccgccagcctgcgcagccgcgtggcgacgctgaaaggcgctgatgccaatattctgcaacaggtgcgtgaaaatctgccgctgatgccaggcttaacgcagctggtgctcaagctggaaacgctgggctggaaagtggcgattgcctccggcggctttactttctttgctgaatacctgcgcgacaagctgcgcctgaccgccgtggtagccaatgaactggagatcatggacggtaaatttaccggcaatgtgatcggcgacatcgttgacgcgcagtacaaagcgaaaactctgacccgcctcgcgcaggagtatgaaatcccgctggcgcagaccgtggcgattggcgatggagccaatgacctgccgatgatcaaagcggcagggctggggattgcctaccatgccaagccaaaagtgaatgaaaagacggaagtcaccatccgtcacgctgacctgatgggggtattctgcatcctctctggcagcctgaatcagaagtaattgcctgcccgtcatcctgcgggcggcacagcattaacgaggtacaccgtggcaaaagctccaaaacgcgcctttgtttgtaatgaatgcggggccgattatccgcgctggcaggggcagtgcagtgcctgtcatgcctggaacaccatcaccgaggtgcgtcttgctgcgtcgccaacggtggcgcgtaacgagcgtctcagtggctatgccggtagcgccggggtggcaaaagtccagaaactctccgacatcagccttgaagagctgccgcgtttttccaccggatttaaagagttcgaccgcgtattaggcggcggcgtggtaccgggaagtgccattctgattggcggtaacccaggcgcggggaaatccacgctgttgctgcaaacgctgtgcaaactggcccagcagatgaaaacgctgtatgtcaccggcgaagagtcgctgcaacaggtggcaatgcgcgctcatcgccttggcctgccgactgacaatctcaatatgttgtcggaaaccagcatcgagcagatctgcctgattgctgaagaagagcaaccgaagctgatggtaattgactccatccaggtgatgcatatggcggatgtacagtcatcgcctggtagcgtggcgcaggtgcgtgaaacggcggcttatttgacacgcttcgccaaaacgcgcggtgtggcgattgtcatggttggacacgtaaccaaagatggctcgctggcgggccctaaagtgctggaacactgtatcgactgttcggtgcttttggatggcgatgccgactcccgttttcgcaccttgcgcagccataaaaaccgcttcggcgcggtgaatgagctgggcgtcttcgcgatgaccgaacaggggctgcgtgaagtcagcaacccttcggcaattttcttaagtcgcggagatgaagtgacctccggcagctccgtgatggtggtgtgggaaggaacgcgtccgttgctggtggagattcaggcgctggtcgatcactcgatgatggcgaatccgcgccgcgtggcggtaggtctggagcaaaaccgtctggcaatcctgctggctgtcttgcaccgtcacggtggtctgcaaatggccgatcaggatgtatttgtgaacgtggtcggtggtgtgaaggtaaccgaaaccagtgccgacttagcgttactgctggcgatggtttccagcctgcgtgacagaccgctaccgcaggatctggtggtgtttggtgaagtcgggctggcaggggagatccgcccggtgcccagcggtcaggagcgaatctctgaagcggcgaaacacggttttcgccgggcgattgttccggcggctaacgtgccgaaaaaagcgccggaagggatgcagatttttggcgttaaaaaactctccgacgcgcttagcgtgttcgacgacttataatgagagatacggagggagatatgtcgtcatttgattacctgaaaactgccatcaagcaacagggctgcacgttacagcaggtagctgatgccagcggtatgaccaaagggtatttaagccagttactgaatgccaaaattaaaagccccagcgcgcaaaagctggaggcgttgcaccgttttttggggcttgaatttccccggcagaagaaaaccattggtgtcgtattcggtaagttctacccgctgcataccggacatatctaccttatccagcgcgcctgtagccaggttgacgagctgcatatcattatgggttttgacgatacccgcgaccgcgcgttgtttgaagacagcgccatgtcgcagcagcccacggtgccggatcgtctgcgctggttattgcaaacttttaaatatcagaaaaatattcgcattcatgctttcaacgaagagggcatggagccgtatccgcatggctgggatgtgtggagcaacggcatcaaaaagtttatggctgaaaaggggatccagccggacctgatctacacctcggaagaagccgatgcgccacagtatatggaacatctggggatcgagacggtactggtcgatccgaaacgtacctttatgagtatcagcggtgcgcagatccgcgaaaacccgttccgctactgggaatatattcctacggaagtgaagccgttctttgtgcgtaccgtggcgatccttggcggcgagtcgagcggtaaatccaccctggtaaacaaacttgccaatatcttcaataccaccagtgcgtgggaatatggtcgcgattatgtcttttcacacctcggcggtgatgagatcgcattgcagtattccgactacgataaaatcgcgctgggccacgcacaatacattgattttgcagtgaaatacgccaataaagtggcgtttattgacactgattttgtcactacccaggcgttctgcaaaaagtacgaagggcgtgagcatccgttcgtgcaggcgttgattgatgaataccgtttcgatctggtgatcctgctggagaacaacacgccgtgggtggcggatggtttacgcagcctcggcagttcggtggatcgcaaagagttccagaacttgctggtggagatgctggaagagaacaatatcgaattcgtgcgggttgaagaggacgattatgacagccgtttcctgcgctgcgtggagctggtgcgggagatgatgggggagcagagataaccgcgatgaaacggctcaaaggcgaggtataaaataagttttttgatgagttgaaaacctttctggaagaggctgtcgagattaaacaaggtttgaaaaaacctgcacgggtgacccgctacgaaattgcggatactaaggctgttgtaggccggaaaaggcgttcacgccgtatccggcattcggtgctcaatgcctgatgcgacgcttaccgcgtcttatcaggcctggagattcacaacgtattgaaatttcttggtttgtaggccggataaggcgttcacgccgcatccggcattttacgcattacttcgcaatacgcttgtacttgatacgcttcggctccagtgcgtctgcgcccagcgtgcgtttcttgtactcttcgtactcagtaaagttaccttcgaagaactcaactttaccttcatcctggtagtccaggatgtgcgtggcgatacggtcgaggaaccaacggtcgtgcgagataaccatcgcacagcccgggaactccagcagggcgttttccagcgcgcgcagggtttcgatatccaggtcgttggttggttcgtcgagcagcagcatgttgccgccaacctgcagcagcttcgccagatgcagacgaccgcgctcaccaccggaaagttcaccaacgcgtttaccctgatcaacccctttaaagttaaagcggccaacgtaggcgcggcttggcatctcggtgttgccgatcttcataatatccagcccgccggaaacttcttcccaaacggttttgctgttatccattgagtcacggaactgatcaaccgatgccagtttcaccgtttcacctaaagtgatggtgccgctgtccggctgttcctgaccagagatcatacggaacagggtcgatttacccgcgccgttcggaccgatgatcccgacgattgcccctttcgggatcgagaagctcaggtcatcaatcagcaggcgatcaccgtaggatttacgcaggttgctgacttccagcactttatcgcccagacgcggtccaggtggaataaacagttcgttggtttcgttacgtttctgatattcggtgctgttcagctcttcaaagcgtgccagacgtgctttacctttcgactggcggcctttagttccctgacgtacccactccagctctttctcgatcgacttacgacgcgccgcttcttgtgaagcttcctgcgccaggcgctgatctttctgctccagccaggaggagtagttgccttcccacggaataccttcaccgcggtcaagttcgaggatccagcctgcaacgttatcgaggaagtaacggtcgtgggtaatcgccaccacggtgccctcgaagtcgtgcaggaagcgttccagccaggccacggattcggcatccaggtggttggtcggttcgtcgagcagcagcatgtctggtttttccagcagcaggcggcacaacgctacgcgacgacgctcaccaccggagaggttagcgattttcgcgtcccagtccggcagacgtagcgcatccgccgcacgctccagctgtacgttcaggttatgaccgtcgtgagcctgaatgatctcttccagacggccttgttcagcggccagcttgtcaaaatcggcatccggatcggcgtacagcgcatacacttcatccaggcgtttcagggcgttaaccacttcagaaaccgcttcttcaatggactcacgcacggtgtgttccgggttcagctgcggttcctgcggcaggtaaccaatcttgatgtctggctgcggacgcgcttcaccttcgatgtctttatcaatgcccgccataatgcgcagcagggtagacttacccgcgccgttcagacccaggacaccaatttttgccccagggaagaaactcagagagatgtttttcaaaatatgacgtttcggcggaacaactttgccgacacgatgcatggtataaacgaattgagccacgttggacttcgcctctatgtttatcgtgatgatgagttttcaaaggcgaagtgtagcctttttccccgcctaatcccagttggtcgatcaccttcgcagtaaaagtaaaaaagtgtccgtaacgtggcgtaaacggcaatgactggttagcataaatctattacgcggcatgacgctgcattgatgtatttacacttagaggatgcgcttgtggaaaaagccaaacaagttacctggcggctgttggctgccggtgtctgtctgctgacggtcagcagcgtggcgcgagccgactcactggatgagcagcgtagccgttacgcgcaaatcaagcaggcctgggataatcgacaaatggatgtggtcgaacaaatgatgcctggactgaaggattatccgctttatccctacctggaataccgccagatcaccgatgatctgatgaatcaaccggcggtgacggtcactaactttgttcgcgctaaccccacgcttcctcccgctcgcacgctgcaatctcgtttcgtcaatgaactggcgcggcgtgaagactggcgtggcttgttagcctttagcccggaaaagcccggaactaccgaagcgcaatgtaattactactatgcgaaatggaacaccgggcagagtgaagaagcctggcaaggggcgaaagagctgtggctaaccggcaagagccagcctaacgcctgtgacaagttatttagcgtctggcgtgcgtcaggtaaacaagatccgctggcttatttagagcgtatccgtctggcgatgaaagcgggtaacactggcctggtaacagtgctggcagggcagatgcctgccgattaccagactatcgcctcggcaatcatttcactggcgaacaaccctaatacggtactgaccttcgcgcgtacaaccggagcgaccgattttacccgtcaaatggcggcggtggcgtttgccagtgtggcgcggcaggatgctgaaaatgcacggctgatgatcccgtcgcttgcccaggcgcagcagcttaatgaagatcatattcaggagctgcgcgatatcgtcgcctggcgtttgatgggcaacgatgtcaccgacgagcaggcgaaatggcgcgatgacgccattatgcgctcgcaatccacgtcgttgattgaacgccgtgtgcgaatggcacttggcaccggcgatcgtcgcggcctgaatacctggctggcgcgtctgccgatggaagcaaaagagaaagatgaatggcgttactggcaggcggatttattgctggaacgcggacgtgaagctgaagcgaaagagattttgcatcaactcatgcaacagcgtggtttctacccgatggttgcagcacaacgcatcggagaagagtatgagctgaagattgataaagcgccgcagaatgttgacagcgccctgactcaggggccggagatggcgcgcgtgcgcgagttgatgtactggaatctcgataacaccgcgcgtagcgagtgggccaatctggtgaagagcaagtcaaaaacagagcaggctcaactggctcggtatgctttcaataaccaatggtgggatcttagcgttcaggcaacgatcgccgggaagctttgggatcatctggaagagcgattcccgctggcttacaacgatcttttcaaacgttacaccagtgggaaagagatcccgcaaagctatgcgatggcgattgcccgtcaggagagcgcctggaatccgaaagtgaaatcaccggtaggggccagcggcctgatgcagattatgcctggtacagcgacccatacggtgaagatgttctctattcctggttatagcagccctgggcaattgctggatccggaaacgaatatcaacattggcaccagttacctgcaatatgtttatcagcagtttggcaataaccgtattttctcctcagcagcttataacgccggacctggacgggtgcgaacctggcttggcaacagcgccgggcgtatcgacgctgtggcatttgtcgagagtattccgttctccgagacgcgcggttatgtgaagaacgtgctggcttatgacgcttactaccgctatttcatgggggataaaccgacgttgatgagcgccacggaatggggacgtcgttactgatccgcacgtttatgatatgctatcgtactctttagcgagtacaaccgggggaggcattttgcttcccccgctaacaatggcgacatattatggcccaacaatcaccctattcagcagcgatggcagaacagcgtcaccaggagtggttacgttttgtcgacctgcttaagaatgcctaccaaaacgatctccatttaccgttgttaaacctgatgctgacgccagatgagcgcgaagcgttggggactcgcgtgcgtattgtcgaagagctgttgcgcggcgaaatgagccagcgtgagttaaaaaatgaactcggcgcgggcatcgcgacgattacgcgtggatctaacagcctgaaagccgcgcccgttgagctgcgccagtggctggaagaggtgttgctgaaaagcgattgattttgtaggcctgataagacgcggcagcgtcgcatcaggcatcgtgcaccgaatgccggatgcggcgtgaacgccttatccgtcctacaatgcctgatacacggcattatgaaacggactcagcgccaggatcaccgcctggtgatagacgctggcgcgggtgagtttcccggcggtaaacacgccgatcgccccttccttacgaccaatctcatcaataccggtataacgcgacatcacggggccgagcgcctcgccttcacgcactttttccagaatcaccgcaggcaacggcaaagtagccgaacgcgcctcgccgcgctggctggcgttttcaatcaccacccaactgaaagtgctgtcaccatcgatgccagcttcaatcgccacccaaaaatcagcctctggaagtaaacggcgggcatttgctacccgatttcgtgcgccagcgcgcgtttcctcactgccaaagggttgttccggtacaccgctctcgacggcaacggatgcaatatggcaggatccttcgccgaagatctcgtgaaatgcctgcagaatggcctgaattttagcgggattggtggtcgcacagacaacttggtgcataatcagcattactcagaaaattaacgttacagcagtatacggaaaaaaagcatgttacaggtatacctagtccgccacggtgaaacgcagtggaacgccgagcgacgtattcagggccagtctgacagcccgctgaccgccaaaggtgagcaacaggcgatgcaggtggcaacccgtgccaaagagcttggcattacgcatatcatcagtagcgatttaggacgcacccggcgtacggcggaaatcatcgcccaggcctgcggctgtgacatcatctttgattctcgcctgcgtgaattaaacatgggtgtgctggaaaaaagacatatcgattctctgaccgaagaagaagagaactggcgtcggcagctggtcaatggcaccgttgacgggcgtattcctgaaggcgagtcaatgcaggagctcagcgatcgcgtcaatgcggcactggaatcttgccgggacttaccgcagggaagccgaccgctgctggtgagtcatggtattgcactgggatgcctggtgagtacgattctcggattaccagcatgggcagagcgccgcttacgtctgcgtaactgttctatttcgcgcgtggattatcaggaaagcctgtggctggcgtctggctgggttgttgaaaccgcaggggacatctcgcatctggacgcccctgcattagatgagttgcagcgttaacgacggatcggaatcagcagttcacagcgcagattaattgggcgatctcctgctttggcatcttctgccgggtagtatcgctcaatatcctgacctttacggcgcgtcaggttaagcattggcatgcatgttccatataccgtcaggataaactcctgcacgccggttcccagaccttcataggtaaacatcacatattcgccgccctgcagcatcaccggatgccccgtcagtacatagccatctgcctgatcctgggctaacgcggtggtatagaatacttcttgttcgtcgtctttatcctgactcggacgcgtttcattcaggccgtagagcaccggcggaatggtcggcgcgttgccgagaaaatcgtgccagaactgataacgcatttcatggcggaaatcagagatttgctccagcgaacaggagtagctctgggtaacaccaatcagcggcgtatcttccagggtgacaaatttgtgctctggcatagtgaattcacccagacgtagcggcgggcgaataccaaaggcgctccattcaggagaacggcggtaaagtgcaggagtctgggcaaactgcttcttgaatgcgcgggtaaatgtctgttgagagtcgaagcggtattgcagcgcgatgtccagaatcggacgcgcagtcaggcgtagtgcgaccgccgatttcgacaaacgacgagcacgaatatacgcgccaatagcatggccagtgacatctttaaacattctctgtaagtgccacttggaataacctgctttcgccgctacattgtcgagcgacaggggctgatccagatgaccttccagccagattaaaaggtcgcgaataatgccggcctgatccataaaatatcctcatcctttcaacaacgagcacctgacatcaggtaattggataatagcattttttgctgttttagcattcagtgtttttttcttagtagagtatgttttagggcttgacggaaataaaagtattgagattttgttcttaatcaatatgttatttaccgtgacgaactaattgctcgtgtaatagataaaaatggtaacaatatgaaatacaagcatttgatcctgtctttaagcctgataatgctggggccattggctcatgcagaggagattggttcggtcgacaccgtatttaaaatgatcggcccggatcacaaaattgttgtggaagcctttgacgatcccgatgtgaaaaatgtcacctgttatgtgagccgggcgaaaaccggtggtattaaagggggattgggcctggcagaagatacctccgatgcggccatttcttgtcagcaagtcgggccgattgaactgtcggatcgtattaaaaacggcaaagctcagggcgaggtagtattcaaaaaacgcacgtccctggtctttaagtcgttacaggtcgtgcgcttttatgacgccaaacgcaacgcgctcgcttatctggcttactccgacaaagttgtagaaggttcgccgaaaaacgcgattagcgcggttcctgtcatgccgtggcggcaataacagaggcgatttatgcaacgggaaacggtctggttagtggaagatgagcaagggatagccgacacgctggtctacatgttgcagcaggaaggttttgccgtcgaggtctttgagcgaggcttgccggtgctggataaagctcgccagcaggttcccgacgtcatgattctcgatgttggtttgcctgatatcagcggctttgaattgtgccgccagttactggcgctccatccggcgttacctgtactgttcctgacggcccgaagtgaagaggtcgatcgcctgcttgggctggaaattggcgctgacgactatgtggctaaaccgttttcaccccgcgaagtgtgcgccagggtgcgcaccttactgcgtcgggtgaagaagttctcgacgccgtctcccgtcatccgtattggtcattttgaattgaatgaacccgcggcgcagatcagctggtttgacacgccattaacgctgacgcggtatgagtttttattgctgaagacgttactcaagtcgccaggccgcgtctggtcccgccagcaactgatggatagcgtgtgggaagatgcgcaggacacctacgatcgcaccgtcgatacccacattaaaacgttgcgtgccaagctgcgcaccatcaaccccgatctttcaccgattaatactcatcgcggcatgggatatagcctgaggggcctgtaatgcgtatcggcatgcggttgctgctgggctattttttactggtggcggtggcggcctggttcgtactggctatttttgtcaaagaagttaaaccgggcgtgcgaagagcaacggaggggacgttgatcgacaccgcaacgttgctggcggagctggcgcgtcccgatttgctctctggggacacaacgcatgggcaactggcgcaggcgtttaatcagctacaacatcgcccgtttcgcgccaatatcggtggcattaacaaagtgcgcaatgaatatcatgtctatatgaccgatgcgcagggcaaagtattgttcgattcggcaaataaagccgttggacaggattattcgcgctggaatgacgtctggctaacgttgcgtggtcagtatggtgcgcgcagcacgttgcaaaatcctgccgatcccgaaagttcggtgatgtatgttgccgcaccgattatggacggctcgcggcttattggcgttttgagcgtaggcaaaccgaacgcagcgatggctccggtcattaagcgtagcgagcggcgaattttatgggccagcgccattttgttggggattgcactggtgattggcgcaggcatggtttggtggatcaaccgctctattgccaggctcactcgctatgctgattccgtcactgacaataagcccgttcctctccccgatctcggtagtagcgagttgcgtaaactcgcgcaggcgctggaaagtatgcgcgtgaagctggaagggaaaaactatattgagcagtatgtttatgcgttaactcatgagctaaaaagcccactggcggcgattcgtggcgcggcggaaattttacgcgaaggtccgccgccggaagtggtggctcgttttaccgacaacattctgacgcaaaatgcgcgaatgcaggcactggtggaaacgttactacgccaggcaagactggagaatcgtcaggaagtcgttctgactgctgttgatgtggcggcattatttcgccgcgtcagcgaagcgcgcaccgtgcagttggcagaaaaaaacatcactttgcatgttatgcctactgaggttaacgttgcttctgaaccggcgttactggagcaggcgctggggaatttactggataacgccatcgattttactcccgagagcggttgcataacgctaagcgccgaagtggatcaggaatacgtcacccttaaggtgctggataccggtagtgggattcctgactacgcgctgtcacgtatttttgaacgcttttactctttgccgcgtgcaaatgggcaaaaaagcagcggtctggggttggcgtttgtcagtgaggtcgcccgtttgtttaacggcgaagtcacgctgcgcaacgtgcaggaaggtggcgtgctggcctcgcttcgacttcaccgtcacttcacatagcttcaaattcttcccacatagccttcgtatcctgctgccattgcaaaggagaagactatgttgaaatcccccctgttctggaaaatgaccaccttgtttggtgcagtattgctgttgttgattccgataatgctgattcggcaggtgattgtcgaacgtgccgattaccgtagcgatgtggaagatgtgattcgccaaagtaccagcgggccgcaaaaactcgttgggccgctcatcgctattcctgtgaccgagctttatacggtgcaggaagacgataaaaccgtggagcggaaaagaagttttattcatttttggttacctgagtcattgatggttgatggcaatcagaacgtggaagaacgcaagataggcatctataccggtcaggtctggcacagtgatttaacgctaaaagccgatttcgatgtttcgcgtcttagcgaactcgacgcgccaaatatcaccttaggcaagccatttattgtgattagcgtcggggatgcgcgtggtattggtgtggtgaaagcgcctgaagttaacggtacggcgctgaccattgaacccggcaccgggttagagcaaggcgggcagggcgtgcatatccctttacccgaaggggactggcgcaagcagaacctgaagctgaatgtggcgctgaatttaagcggtaccggcgatctttctgtggtgcctggcgggcgttatagcgaaatgaccttaaccagcaactggccgcatcccagttttttaggtgattttctaccagccaaacgggaagttagcgagtcaggttttcaggcgcaatggcaaagtagctggtttgctaataatctcggtgagcgttttgcttcaggcaatgataccggctgggaaaacttccccgcgtttagcgtcgcagtgacgacgccagccgatcaataccaattaacggaccgggcgactaagtacgccattctgctgattgcgctgacttttatggcattctttgtttttgaaacgctcaccgcgcaacgtttacacccaatgcaatatttgctggtggggctgtcattggtgatgttttatttgctcttgctggcgctttctgaacataccggttttactgtggcatggataatcgccagtctgattggggcgttaatgaacggtatttatttgcaggcggtattgaaaggctggcgtaatagcatgttgtttaccctcgcgctgttgttgctggatggtgtgatgtggggactgctcaactctgccgatagcgcgctgttgttgggaaccagtgtactggtggtggcgctggccggcatgatgtttgtgacccgtaatatcgactggtatgcgttttcactgccgaaaatgaaagccagtaaagaagttacaacggacgatgaattacgtatctggaaataagatagaaaaataaaaacggcgctaaaaagcgccgtttttattgacggtggtaaagccgattaatcttccagatcaccgcagaagcgataaccttcaccgtgaatggtggcgatgatttccggcgtatccggcgtagattcgaaatgtttacgaatacggcggatcgtcacgtctacagtacggtcgtgcggtttcagctcacggccagtcattttcttcagcagttcagcacgggactgaattttgcctgggttttcacagaagtgaagcatggcgcggaactcgctgcgcggcagcttgtactgctcgccatcagggccaatcaacgaacggctgttgatgtccagttcccaaccattgaacttgtagctttcaacgctacgacgttcttcgctgacagtacccagattcatggtacgggacagcaggttgcgtgcacgaatagtcagttcacgcgggttgaacggtttggtgatgtagtcatctgcaccgatttcgaggccgagaattttatcgacttcgttgtcacggccagtcaggaacatcaacgcaacattcgcctgctcgcgcagttcacgcgctaacagaagaccgtttttacccggcagattgatatccatgatcaccaggttgatgtcatattcagagaggatctgatgcatttccgcgccatctgtcgcttcgaaaacatcatagccttccgcttcgaaaatacttttcaacgtgttgcgtgttaccaactcgtcttcaacgataagaatgtgcggggtctgcatgtttgctacctaaattgccaactaaatcgaaacaggaagtacaaaagtccctgacctgcctgatgcatgctgcaaattaacatgatcggcgtaacatgactaaagtacgtaattgcgttcttgatgcactttccatcaacgtcaacaacatcattagcttggtcgtgggtactttccctcaggacccgacagtgtcaaaaacggctgtcatcctaaccattttaacagcaatataacaggctaagaggggcaggacacccaataaaactacgcttcgttgacatatatcaagttcaattgtagcacgttaacagtttgatgaaatgatcgtatctaaatgctagctttcgtcacattattttaataatccaactagttgcatcatacaactaataaacctggtgaatccaattatcgagatttattttttataaaattatcctaagtaaacagaaggatatgtagcattttttaacaattcaatcgttagtacagtcaggaaatagtttagccttttttaagctaagcaaagggcttttcctgcgacttacgttaagaatttgtaaattcgcaacgcgtaataagttgacaatgatcaccctgttcgcggttatttggtcaagaagagtggcaatatgcgtataacgattattctggttgcacccgccagagcagaaaatattggggcagcggcgcgggcaatgaaaacgatgggttttagcgaactgcggattgttgatagtcaggcacacctggagccagccgcccgttgggtcgcacatggatctggtgatattattgataatattaaagttttcaagacactagctgaatcgttacacgatgtcgatttcactgttgccaccactgcgcgcagtcgggcgaaatatcattactacgctacgccagtagaactggtgccgctgttagaggaaaaatcttcatggatgagccatgccgctctggtgtttggtcgcgaagattccgggctgactaacgaagagttagcgttggctgacgttcttactggtgtgccgatggtggcggattatccttcgctcaatctggggcaggcagtgatggtctattgctatcaattagcaacattaatacaacaaccggcgaaaagtgacacaacggcagaccaacatcaactgcaagctttacgcgaacgagccatgacattgctgacgactctggcagtggcagatgacataaaactggtcgactggttacaacaacgcctggggcttttagagcaacgagacacggcaatgttgcaccgtttgctgcatgatattgaaaaaaatatcaccaaataaaaaacgccttagtaagtgattttcgttaatgaggcgaaccgggggaactgaaacatctaagtaccccgaggaaaagaaatcaaccgagattcccccagtagcggcgagcgaacggggaggagcccagagcctgaatcagtgtgtgtgttagtggaagcgtctggaaaggcgtgcgatacagggtgacagccccgtacacaaaaatgcacatattgtgagctcgatgagtagggcgggacacgtggtatcctgtctgaatatggggggaccatcctccaaggctaaatactcctgactgaccgatagtgaaccagtaccgtgagggaaaggcgaaaagaaccccggcgaggggagtgaaaaagaacctgaaaccgtgtacgtacaagcagtgggagcctcttaatggggtgactgcgtaccttttgtataatgggtcagcgacttatattctgtagcaaggttaaccgaataggggagccgaagggaaaccgagtcttaactgggcgttaagttgcagggtatagacccgaaacccggtgatctagccatgggcaggttgaaggttgggtaacactaactggaggaccgaaccgactaatgttgaaaaattagcggatgacttgtggctgggggtgaaaggccaatcaaaccgggagatagctggttctccccgaaagctatttaggtagcgcctcgtgaattcatctccgggggtagagcactgtttcggcaagggggtcatcccgacttaccaacccgatgcaaactgcgaataccggagaatgttatcacgggagacacacggcgggtgctaacgtccgtcgtgaagagggaaacaacccagaccgccagctaaggtcccaaagtcatggttaagtgggaaacgatgtgggaaggcccagacagccaggatgttggcttagaagcagccatcatttaaagaaagcgtaatagctcactggtcgagtcggcctgcgcggaagatgtaacggggctaaaccatgcaccgaagctgcggcagcgacactatgtgttgttgggtaggggagcgttctgtaagcctgtgaaggtggcctgtgagggttgctggaggtatcagaagtgcgaatgctgacataagtaacgataaagcgggtgaaaagcccgctcgccggaagaccaagggttcctgtccaacgttaatcggggcagggtgagtcgacccctaaggcgaggccgaaaggcgtagtcgatgggaaacaggttaatattcctgtacttggtgttactgcgaaggggggacggagaaggctatgttggccgggcgacggttgtcccggtttaagcgtgtaggctggttttccaggcaaatccggaaaaccaaggctgaggcgtgatgacgaggcactacggtgctgaagtgacaaatgccctgcttccaggaaaagcctctaagcatcaggtaacatcaaatcgtaccccaaaccgacacaggtggtcaggtagagaataccaaggcgcttgagagaactcgggtgaaggaactaggcaaaatggtgccgtaacttcggganaaggcncnctgatntgtaggtgaagcgacttgctcgtggagctgaaatcagtcgaagataccagctggctgcaactgtttattaaaaacacagcactgtgcaaacacgaaagtggacgtatacggtgtgacgcctgcccggtgccggaaggttaattgatggggttagcggtaacgcgaagctcttgatcgaagccccggtaaacggcggccgtaactataacggtcctaaggtagcgaaattccttgtcgggtaagttccgacctgcacgaatggcgtaatgatggccaggctgtctccacccgagactcagtgaaattgaactcgctgtgaagatgcagtgtacccgcggcaagacnnnnnnnnnnnnnnnnnnnnnnnnnnnnnnnnnnnnnnnnnnnnnnnnnnnnnnnnnnnnnnnnnnnnnnnnnnnnnnnnnnnnnnnnnnnnnnnnnnnnnnnnnnnnnnnnnnnnnnnnnnnnnnnnnnnnnnnnnnnnnnnnnnnnnnnnnnnnnnnnnnnnnnnnnnnnnnnnnnnnnnnnnnnnnnnnnnnnnnnnnnnnnnnnnnnnnnnnnnnnnnnnnnnnnnnnnnnnnnnnnnnnnnnnnnnnnnnnnnnnnnnnnnnnnnnnnnnnnnnnnnnnnnnnnnnnnnnnnnnnnnnnnnnnnnnnnnnnnnnnnnnnnnnnnnnnnnnnnnnnnnnnnnnnnnnnnnnnnnnnnnnnnnnnnnnnnnnnnnnnnnnnnnnnnnnnnnnnnnnnnnnnnnnnnnnnnnnnnnnnnnnnnnnnnnnnnnnnnnnnntgtcagagccataaatcagccggtgcagactccggggtacgatggcaatcttcggtttttcaccattgaatgacacccacccgggcgtcagattctggaagtagtggatattcggatgacacacgccccaggatacggcgtgccgggtgaagccggtcagccatttctggtagctttcgtggagcagctcgtaacgggtctgatactgtggtttcattttcatattcctcacgggggataacaggcagcagagtgccgccggcaggccggagattgcgtctgctgtgggcgaagggccagtggttaaaaattacggacgggactgtgcaatacgcgcctgcagccaggcttccacttcacttttcagccagcgggagctgcggccgagtttgatgggtgccggaaaggccccatccttgatgagcttgtaaaaccacttatcggtcaggccggtcagctgagtgataaacgtcatatcgaccatctggtcatccatcagcgaaactggggtggtcataaaaatctcctccggatgttgttaatctcagccggcgttgatgatgaaaacaacgcaccaccttcacnnnnnnnnnnnnnnnnnnnnnnnnnnnnnnnnnnnnnnnnnnnnnnnnnnnnnnnnnnnnnnnnnnnnnnnnnnnnnnnnnnnnnnnnnnnnnnnnnnnnnnnnnnnnnnnnnnnnnnnnnnnnnnnnnnnnnnnnnnnnnnnnnnnnnnnnnnnnnnnnnnnnnnnnnnnnnnnnggaaactgcctgatggagggggataactactggaaacggtagctaataccgcataacgtcgcaagaccaaagagggggaccttcaggcctcttgccatcggatgtgcccagatgggattagctagtaggtggggtaaaggctcacctaggcgacgatccctagctggtctgagaggatgaccagccacactggaactgagacacggtccagactcctacgggaggcagcagtggggaatattgcacaatgggcgcaagcctgatgcagccatgccgcgtgtatgaagaaggccttcgggttgtaaagtactttcagcggggaggaagggagtaaagttaatacctttgctcattgacgttacccgcagaagaagcaccggctaactccgtgccagcagccgcggtaatacggagggtgcaagcgttaatcggaattactgggcgtaaagcgcacgcaggcggtttgttaagtcagatgtgaaatccccgggctcaacctgggaactgcatctgatactggcaagcttgagtctcgtagaggggggtagaattccaggtgtagcggtgaaatgcgtagagatctggaggaataccggtggcgaaggcggccccctggacgaagactgacgctcaggtgcgaaagcgtggggagcaaacaggattagataccctggtagtccacgccgtaaacgatgtcgacttggaggttgtgcccttgaggcgtggcttccggagctaacgcgttaagtcgaccgcctggggagtacggccgcaaggttaaaactcaaatgaattgacgggggcccgcacaagcggtggagcatgtggtttaattcgatgcaacgcgaagaaccttacctggtcttgacatccacggaagttttcagagatgagaatgtgccttcgggaaccgtgagacaggtgctgcatggctgtcgtcagctcgtgttgtgaaatgttgggttaagtcccgcaacgagcgcaacccttatcctttgttgccagcggtccggccgggaactcaaaggagactgccagtgataaactggaggaaggtggggatgacgtcaagtcatcatggcccttacgaccagggctacacacgtgctacaatggcgcatacaaagagaagcganctcgcgagagcaagcggacctcataaagtgcgtcgtagtccggattggagtctgcaactcgactccatgaagtcggaatcgctagtaatcgtggatcagaatgccacggtgaatacgttcccgggccttgtacacaccgcccgtcacaccatgggagtgggttgcaaaagaagtaggtagcttaaccttcgggagggcgcttaccactttgtgattcatgactggggtgaagtcgtaacaaggtaaccgtaggggaacctgcggttggatcacctccttaccttaaagaagcgtactttgcagtgctcacacagattgtctgatgaaaatgagcagtaaaacctctacaggcttgtagctcaggtggttagagcgnacccctgataagggtgaggtcggtggttcaagtccactcaggcctaccaaatttgcaccgcaaatttgaagaggttttaactacatgttatggggctatagctcagctgggagagcgcctgctttgcacgcaggaggtctgcggttcgatcccgcatagctccaccatctctgtagtgattaaataaaaaatacttcagagtgtacctgcaaaggttcactgcgaagttttgctctttaaaaatctggatcaagctgaaaattgaaacactgaacaacgagagttgttcgtgagtctctcaaattttcgcaacacgatgatgaatcgcaagaaacatcttcgggttgtgaggttaagcgactaagcgtacacggtggatgccctggcagtcagaggcgatgaaggacgtgctaatctgcgataagcgtcggtgaggtgatatgaaccgttataaccggcgatttccgaatggggaaacccagtgtgtttcgacacactatcattaactgaatccatagnnnnnnnnnnnnnnnnnnnnnnnnnnnnnnnnnnnnnnnnnnnnnnnnnnnnnnnnnnnnnnnnnnnnnnnnnnnnnnnnnnnnnnnnnnnnnnnnnnnnnnnnnnnnnnnnnnnnnnnnnnnnnnnnnnnnnnnnnnnnnnnnnnnnnnnnnnnnnnnnnnnnnnnnnnnnnnnnnnnnnnnnnnnnnnnnnnnnnnnnnnnnnnnnnnnnnnnnnnnnnnnnnnnnnnnnnnnnnnnnnnnnnnnnnnnnnnnnnnnnnnnnnnnnnnnnnnnnnnnnnnnnnnnnnnnnnnnnnnnnnnnnnnnnnnnnnnnnnnnnnnnnnnnnnnnnnnnnnnnnnnnnnnnnnnnnnnnnnnnnnnnnnnnnnnnnnnnnnnnnnnnnnnnnnnnnnnnnnnnnnnnnnnnnnnnnnnnnnnnnnnnnnnnnnnnnnnnnnnnnnnnnnnnnnnnnnnnnnnnnnnnnnnnnnnnnnnnnnnnnnnnnnnnnnnnnnnnnnnnnnnnnnnnnnnnnnnnnnnnnnnnnnnnnnnnnnnnnnnnnnnnnnnnnnnnnnnnnnnnnnnnnnnnnnnnnnnnnnnnnnnnnnnnnnnnnnnnnnnnnnnnnnnnnnnnnnnnnnnnnnnnnnnnnnnnnnnnnnnnnnnnnnnnnnnnnnnnnnnnnnnnnnnnnnnnnnnnnnnnnnnnnnnnnnnnnnnnnnnnnnnnnnnnnnnnnnnnnnnnnnnnnnnnnnnnnnnnnnnnnnnnnnnnnnnnnnnnnnnnnnnnnnnnnnnnnnnnnnnnnnnnnnnnnnnnnnnnnnnnnnnnnnnnnnnnnnnnnnnnnnnnnnnnnnnnnnnnnnnnnnnnnnnnnnnnnnnnnnnnnnnnnnnnnnnnnnnnnnnnnnnnnnnnnnnnnnnnnnnnnnnnnnnnnnnnnnnnnnnnnnnnnnnnnnnnnnnnnnnnnnnnnnncacaatatagctgctcttctcgcatttttgccgattttaaaaatgcgaacaaaacatccgtacatgatgtacagattaaactgccagggactggtgtcagaaagcctccggttagcctgctctttccggaatgtgccggttatgaaaaaccggaaattcagtctctgttgtaagatgtaccctctgatactacgttttcgttttctctgtgtatttaactcactgtatttattgtctttttaagcctgactgatattctccggtcatagtgtgctggatagacatcccgtaaccttctcatttttatataaaaatacctgcactgtcttcagcgcatctgtctcctttaagtaaaaaatgttttcacgtattgctgtaaattcattttaaatcagtatgttatcctgatattgctgtctcctggtttgatgcgtaatcgttctgcctttctggatgattctggtgcttccgggtgcattctcctctgcacatgcaacagttcgtcatcgccacgtgcccaaaaagcatataaaaacgaatcgaatctgatcgttttttcaatcgtttttcacaggaatttcgtagggtgttctccgctatagcctccatatttgctgtctttttcttcataaatcgtatgcaatataaccagtctgtcaagacatcttccctgctgttgaggtgacgatctcatttctggtcttttccgggagagagacggtcagatgagcgagccggatttactgccagaggtactccccgcggcagaaaatagtgctcctgtttccgcaatccgggatcggcaacgtcccatggttaatgccacttgcagcgtcaggcactgcaggtttacgtcgtgatctgatttcttctgcacttatcccgatcacggaagttccccctgcgcagacatcggttcctgccgacatttcacaataccgccaggctgtcatgcagtaacacccgcaatgcggtctgcggttttaagcgcactctcctgttttcagtgcaccgataagcgttatagaaagtctggggtgagttactgaatgtctgttaagtggtgccgtgggtggagactgcttacttttccacagcaactgcagtcattcaggatgctcaggagagaatatgtcaacgccacgagccgggccattttcatgccagccagtatatnnnnnnnnnnnnnnnnnnnnnnnnnnnnnnnnnnnnnnnnnnnnnnnnnnnnnnnnnnnnnnnnnnnnnnnnnnnnnnnnnnnnnnnnnnnnnnnnnnnnnnnnnnnnnnnnnnnnnnnnnnnnnnnnnnnnnnnnnnnnnnnnnnnnnnnnnnnnnnnnnnnnnnnnnnnnnnnnnnnnnnnnnnnnnnnnnnnnnnnnnnnnnnnnnnnnnnnnnnnnnnnnnnnnnnnnnnnnnnnnnnnnnnnnnnnnnnnnnnnnnnnnnnnnnnnnnnnnnnnnnnnnnnnnnnnnnnnnnnnnnnnnnnnnnnnnnnnnnnnnnnnnnnnnnnnnnnnnnnnnnnnnnnnnnnnnnnnnnnnnnnnnnnnnnnnnnnnnnnnnnnnnnnnnnnnnnnnnnnnnnnnnnnnnnnnnnnnnnnnnnnnnnnnnnnnnnnnnnnnnnnnnnnnnnnnnnnnnnnnnnnnnnnnnnnnnnnnnnnnnnnnnnnnnnnnnnnnnnnnnnnnnnnnnnnnnnnnnnnnnnnnnnnnnnnnnnnnnnnnnnnnnnnnnnnnnnnnnnnnnnnnnnnnnnnnnnnnnnnnnnnnnnnnnnnnnnnnnnnnnnnnnnnnnnnnnnnnnnnnnnnnnnnnnnnnnnnnnnnnnnnnnnnnnnnnnnnnnnnnnnnnnnnnnnnnnnnnnnnnnnnnnnnnnnnnnnnnnnnnnnnnnnnnnnnnnnnnnnnnnnnnnnnnnnnnnnnnnnnnnnnnnnnnnnnnnnnnnnnnnnnnnnnnnnnnnnnnnnnnnnnnnnnnnnnnnnnnnnnnnnnnnnnnnnnnnnnnnnnnnnnnnnnnnnnnnnnnnnnnnnnnnnnnnnnnnnnnnnnnnnnnnnnnnnnnnnnnnnnnnnnnnnnnnnnnnnnnnnnnnnnnnnnnnnnnnnnnnnnnnnnnnnnnnnnnnnnnnnnnnnnnnnnnnnnnnnnnnnnnnnnnnnnnnnnnnnnnnnnnnnnnnnnnnnnnnnnnnnnnnnnnnnnnnnnnnnnnnnnnnnnnnnnnnnnnnnnnnnnnnnnnnnnnnnnnnnnnnnnnnnnnnnnnnnnnnnnnnnnnnnnnnnnnnnnnnnnnnnnnnnnnnnnnnnnnnnnnnnnnnnnnnnnnnnnnnnnnnnnnnnnnnnnnnnnnnnnnnnnnnnnnnnnnnnnnnnnnnnnnnnnnnnnnnnnnnnnnnnnnnnnnnnnnnnnnnnnnnnnnnnnnnnnnnnnnnnnnnnnnnnnnnnnnnnnnnnnnnnnnnnnnnnnnnnnnnnnnnnnnnnnnnnnnnnnnnnnnnnnnnnnnnnnnnnnnnnnnnnnnnnnnnnnnnnnnnnnnnnnnnnnnnnnnnnnnnnnnnnnnnnnnnnnnnnnnnnnnnnnnnnnnnnnnnnnnnnnnnnnnnnnnnnnnnnnnnnnnnnnnnnnnnnnnnnnnnnnnnnnnnnnnnnnnnnnnnnnnnnnnnnnnnnnnnnnnnnnnnnnnnnnnnnnnnnnnnnnnnnnnnnnnnnnnnnnnnnnnnnnnnnnnnnnnnnnnnnnnnnnnnnnnnnnnnnnnnnnnnnnnnnnnnnnnnnnnnnnnnnnnnnnnnnnnnnnnnnnnnnnnnnnnnnnnnnnnnnnnnnnnnnnnnnnnnnnnnnnnnnnnnnnnnnnnnnnnnnnnnnnnnnnnnnnnnnnnnnnnnnnnnnnnnnnnnnnnnnnnnnnnnnnnnnnnnnnnnnnnnnnnnnnnnnnnnnnnnnnnnnnntgttccgtcacccggaaaacgagtacgactggcagagctcagacgccgctgtggatgaggtcctgctcatcaacgaatacacctttaccgaagccggtctgcgcgccggctgacccgtcatcgttaaactatcattcaccgattttctgtgaggattttatcgtgtcagacacnnnnnnnnnnnnnnnnnnnnnnnnnnnnnnnnnnnnnnnnnnnnnnnnnnnnnnnnnnnnnnnnnnnnnnnnnnnnnnnnnnnnnnnnnnnnnnnnnnnnnnnnnnnnnnnnnnnnnnnnnnnnnnnnnnnnnnnnnnnnnnnnnnnnnnnnnnnnnnnnnnnnnnnnnnnnnnnnnnnnnnnnnnnnnnnnnnnnntttaataagattaatttttatgatagtgataatttatgatggggattcatatggcatatctaaaaggatagattacatgttgaattctacaacatcttcgggaaaaagaaccggcattttagcaattggtgcccatcctgatgannnnnnnnnnnnnnnnnnnnnnnnnnnnnnnnnnnnnnnnnnnnnnnnnnnnnnnnnnnnnnnnnnnnnnnnnnnnnnnnnnnnnnnnnnnnnnnnnnnnnnnnnnnnnnnnnnnnnnnnnnnnnnnnnnnnnnnnnnnnnnnnnnnnnnnnnnnnnnnnnnnnnnnnnnnnnnnnnnnnnnnnnnnnnnnnnnnnnnnnnnnnnnnnnnnnnnnnnnnnnnnnnnnnnnnnnnnnnnnnnnnnnnnnnnnnnnnnnnnnnnnnnnnnnnnnnnnnnnnnnnnnnnnnnnnnnnnnnnnnnnnnnnnnnnnnnnnnnnnnnnnnnnnnnnnnnnnnnnnnnnnnnnnnnnnnnnnnnnnnnnnnnnnnnnnnnnnnnnnnnnnnnnnnnnnnnnnnnnnnnnnnnnnnnnnnnnnnnnnnnnnnnnnnnnnnnnnnnnnnnnnnnnnnnnnnnnnnnnnnnnnnnnnnnnnnnnnnnnnnnnnnnnnnnnnnnnnnnnnnnnnnnnnnnnnnnnnnnnnnnnnnnnnnnnnnnnnnnnnnnnnnnnnnnnnnnnnnnnnnnnnnnnnnnnnnnnnnnnnnnnnnnnnnnnnnnnnnnnnnnnnnnnnnnnnnnnnnnnnnnnnnnnnnnnnnnnnnnnnnnnnnnnnnnnnnnnnnnnnnnnnnnnnnnnnnnnnnnnnnnnnnnnnnnnnnnnnnnnnnnnnnnnnnnnnnnnnnnnnnnnnnnnnnnnnnnnnnnnnnnnnnnnnnnnnnnnnnnnnnnnnnnnnnnnnnnnnnnnnnnnnnnnnnnnnnnnnnnnnnnnnnnnnnnnnnnnnnnnnnnnnnnnnnnnnnnnnnnnnnnnnnnnnnnnnnnnnnnnnnnnnnnnnnnnnnnnnnnnnnnnnnnnnnnnnnnnnnnnnnnnnnnnnnnnnnnnnnnnnnnnnnnnnnnnnnnnnnnnnnnnnnnnnnnnnnnnnnnnnnnnnnnnnnnnnnnnnnnnnnnnnnnnnnnnnnnnnnnnnnnnnnnnnnnnnnnnnnnnnnnnnnnnnnnnnnnnnnnnnnnnnnnnnnnnnnnnnnnnnnnnnnnnnnnnnnnnnnnnnnnnnnnnnnnnnnnnnnnnnnnnnnnnnnnnnnnnnnnnnnnnnnnnnnnnnnnnnnnnnnnnnnnnnnnnnnnnnnnnnnnnnnnnnnnnnnnnnnnnnnnnnnnnnnnnnnnnnnnnnnnnnnnnnnnnnnnnnnnnnnnnnnnnnnnnnnnnnnnnnnnnnnnnnnnnnnnnnnnnnnnnnnnnnnnnnnnnnnnnnnnnnnnnnnnnnnnnnnnnnnnnnnnnnnnnnnnnnnnnnnnnnnnnnnnnnnnnnnnnnnnnnnnnnnnnnnnnnnnnnnnnnnnnnnnnnnnnnnnnnnnnnnnnnnnnnnnnnnnnnnnnnnnnnnnnnnnnnnnnnnnnnnnnnnnnnnnnnnnnnnnnnnnnnnnnnnnnnnnnnnnnnnnnnnnnnnnnnnnnnnnnnnnnnnnnnnnnnnnnnnnnnnnnnnnnnnnnnnnnnnnnnnnnnnnnnnnnnnnnnnnnnnnnnnnnnnnnnnnnnnnnnnnnnnnnnnnnnnnnnnnnnnnnnnnnnnnnnnnnnnnnnnnnnnnnnnnnnnnnnnnnnnnnnnnnnnnnnnnnnnnnnnnnnnnnnnnnnnnnnnnnnnnnnnnnnnnnnnnnnnnnnnnnnnnnnnnnnnnnnnnnnnnnnnnnnnnnnnnnnnnnnnnnnnnnnnnnnnnnnnnnnnnnnnnnnnnnnnnnnnnnnnnnnnnnnnnnnnnnnnnnnnnnnnnnnnnnnnnnnnnnnnnnnnnnnnnnnnnnnnnnnnnnnnnnnnnnnnnnnnnnnnnnnnnnnnnnnnnnnnnnnnnnnnnnnnnnnnnnnnnnnnnnnnnnnnnnnnnnnnnnnnnnnnnnnnnnnnnnnnnnnnnnnnnnnnnnnnnnnnnnnnnnnnnnnnnnnnnnnnnnnnnnnnnnnnnnnnnnnnnnnnnnnnnnnnnnnnnnnnnnnnnnnnnnnnnnnnnnnnnnnnnnnnnnnnnnnnnnnnnnnnnnnnnnnnnnnnnnnnnnnnnnnnnnnnnnnnnnnnnnnnnnnnnnnnnnnnnnnnnnnnnnnnnnnnnnnnnnnnnnnnnnnnnnnnnnnnnnnnnnnnnnnnnnnnnnnnnnnnnnnnnnnnnnnnnnnnnnnnnnnnnnnnnnnnnnnnnnnnnnnnnnnnnnnnnnnnnnnnnnnnnnnnnnnnnnnnnnnnnnnnnnnnnnnnnnnnnnnnnnnnnnnnnnnnnnnnnnnnnnnnnnnnnnnnnnnnnnnnnnnnnnnnnnnnnnnnnnnnnnnnnnnnnnnnnnnnnnnnnnnnnnnnnnnnnnnnnnnnnnnnnnnnnnnnnnnnnnnnnnnnnnnnnnnnnnnnnnnnnnnnnnnnnnnnnnnnnnnnnnnnnnnnnnnnnnnnnnnnnnnnnnnnnnnnnnnnnnnnnnnnnnnnnnnnnnnnnnnnnnnnnnnnnnnnnnnnnnnnnnnnnnnnnnnnnnnnnnnnnnnnnnnnnnnnnnnnnnnnnnnnnnnnnnnnnnnnnnnnnnnnnnnnnnnnnnnnnnnnnnnnnnnnnnnnnnnnnnnnnnnnnnnnnnnnnnnnnnnnnnnnnnnnnnnnnnnnnnnnnnnnnnnnnnnnnnnnnnnnnnnnnnnnnnnnnnnnnnnnnnnnnnnnnnnnnnnnnnnnnnnnnnnnnnnnnnnnnnnnnnnnnnnnnnnnnnnnnnnnnnnnnnnnnnnnnnnnnnnnnnnnnnnnnnnnnnnnnnnnnnnnnnnnnnnnnnnnnnnnnnnnnnnnnnnnnnnnnnnnnnnnnnnnnnnnnnnnnnnnnnnnnnnnnnnnnnnnnnnnnnnnnnnnnnnnnnnnnnnnnnnnnnnnnnnnnnnnnnnnnnnnnnnnnnnnnnnnnnnnnnnnnnnnnnnnnnnnnnnnnnnnnnnnnnnnnnnnnnnnnnnnnnnnnnnnnnnnnnnnnnnnnnnnnnnnnnnnnnnnnnnnnnnnnnnnnnnnnnnnnnnnnnnnnnnnnnnnnnnnnnnnnnnnnnnnnnnnnnnnnnnnnnnnnnnnnnnnnnnnnnnnnnnnnnnnnnnnnnnnnnnnnnnnnnnnnnnnnnnnnnnnnnnnnnnnnnnnnnnnnnnnnnnnnnnnnnnnnnnnnnnnnnnnnnnnnnnnnnnnnnnnnnnnnnnnnnnnnnnnnnnnnnnnnnnnnnnnnnnnnnnnnnnnnnnnnnnnnnnnnnnnnnnnnnnnnnnnnnnnnnnnnnnnnnnnnnnnnnnnnnnnnnnnnnnnnnnnnnnnnnnnnnnnnnnnnnnnnnnnnnnnnnnnnnnnnnnnnnnnnnnnnnnnnnnnnnnnnnnnnnnnnnnnnnnnnnnnnnnnnnnnnnnnnnnnnnnnnnnnnnnnnnnnnnnnnnnnnnnnnnnnnnnnnnnnnnnnnnnnnnnnnnnnnnnnnnnnnnnnnnnnnnnnnnnnnnnnnnnnnnnnnnnnnnnnnnnnnnnnnnnnnnnnnnnnnnnnnnnnnnnnnnnnnnnnnnnnnnnnnnnnnnnnnnnnnnnnnnnnnnnnnnnnnnnnnnnnnnnnnnnnnnnnnnnnnnnnnnnnnnnnnnnnnnnnnnnnnnnnnnnnnnnnnnnnnnnnnnnnnnnnnnnnntaatatatctcgctcaaggcgagcttcatttaacgccttacgcagttgcagaatttcagattccagttcagccaccgtgcgggaaccaggagtaccgagcccttttctggcggcggtaacccattgtcctaaagtgccttcaggaagagataatcgggaagcgccttcactgatcgaaagttgattttcaagaaccgttctgacagcttcggctttgaactctttagagtaacgttgggtttttctgctcattattagctctgtaagcgtacagcctgaaccgtctggtcagaatctgacgaattagacaaagtggtgtccaccaaataagtagtgggaaccaaagtgtcagatatgcagaaaaatgtgactcccggcaggcgaaaaggctgccctaattatcctcccgaannnnnnnnnnnnnnnnnnnnnnnnnnnnnnnnnnnnnnnnnnnnnnnnnnnnnnnnnnnnnnnnnnnnnnnnnnnnnnnnnnnnnnnnnnnnnnnnnnnnnnnnnnnnnnnnnnnnnnnnnnnnnnnnnnnnnnnnnnnnnnnnnnnnnnnnnnnnnnnnnnnnnnnnnnnnnnnnnnnnnnnnnnnnnnnnnnnnnnnnnnnnnnnnnnnnnnnnnnnnnnnnnnnnnnnnnnnnnnnnnnnnnnnnnnnnnnnnnnnnnnnnnnnnnnnnnnnnnnnnnnnnnnnnnnnnnnnnnnnnnnnnnnnnnnnnnnnnnnnnnnnnnnnnnnnnnnnnnnnnnnnnnnnnnnnnnnnnnnnnnnnnnnnnnnnnnnnnnnnnnnnnnnnnnnnnnnnnnnnnnnnnnnnnnnnnnnnnnnnnnnnnnnnnnnnnnnnnnnnnnnnnnnnnnnnnnnnnnnnnnnnnnnnnnnnnnnnnnnnnnnnnnnnnnnnnnnnnnnnnnnnnnnnnnnnnnnnnnnnnnnnnnnnnnnnnnnnnnnnnnnnnnnnnnnnnnnnnnnnnnnnnnnnnnnnnnnnnnnnnnnnnnnnnnnnnnnnnnnnnnnnnnnnnnnnnnnnnnnnnnnnnnnnnnnnnnnnnnnnnnnnnnnnnnnnnnnnnnnnnnnnnnnnnnnnnnnnnnnnnnnnnnnnnnnnnnnnnnnnnnnnnnnnnnnnnnnnnnnnnnnnnnnnnnnnnnnnnnnnnnnnnnnnnnnnnnnnnnnnnnnnnnnnnnnnnnnnnnnnnnnnnnnnnnnnnnnnnnnnnnnnnnnnnnnnnnnnnnnnnnnnnnnnnnnnnnnnnnnnnnnnnnnnnnnnnnnnnnnnnnnnnnnnnnnnnnnnnnnnnnnnnnnnnnnnnnnnnnnnnnnnnnnnnnnnnnnnnnnnnnnnnnnnnnnnnnnnnnnnnnnnnnnnnnnnnnnnnnnnnnnnnnnnnnnnnnnnnnnnnnnnnnnnnnnnnnnnnnnnnnnnnnnnnnnnnnnntccggtcctctcgtactaggagcagcccccctcagttctccagcgcccacggcagatagggaccgaactgtctcacgacgttctannnnnnnnnnnnnnnnnnnnnnnnnnnnnnnnnnnnnnnnnnnnnnnnnnnnnnnnnnnnnnnnnnnnnnnnnnnnnnnnnnnnnnnnnnnnnnnnnnnnnnnnnnnnnnnnnnnnnnnnnnnnnnnnnnnnnnnnnnnnnnnnnnnnnnnnnnnnnnnnnnnnnnnnnnnnnnnnnnnnnnnnnnnnnnnnnnnnnnnnnnnnnnnnnnnnnnnnnnnnnnnnnnnnnnnnnnnnnnnnnnnnnnnnnnnnnnnnnnnnnnnnnnnnnnnnnnnnnnnnnnnnnnnnnnnnnnnnnnnnnnnnnnnnnnnnnnnnnnnnnnnnnnnnnnnnnnnnnnnnnnnnnnnnnnnnnnnnnnnnnnnnnnnnnnnnnnnnnnnnnnnnnnnnnnnnnnnnnnnnnnnnnnnnnnnnnnnnnnnnnnnnnnnnnnnnnnnnnnnnnnnnnnnnnnnnnnnnnnnnnnnnnnnnnnnnnnnnnnnnnnnnnnnnnnnnnnnnnnnnnnnnnnnnnnnnnnnnnnnnnnnnnnnnnnnnnnnnnnnnnnnnnnnnnnnnnnnnnnnnnnnnnnnnnnnnnnnnnnnnnnnnnnnnnnnnnnnnnnnnnnnnnnnnnnnnnnnnnnnnnnnnnnnnnnnnnnnnnnnnnnnnnnnnnnnnnnnnnnnnnnnnnnnnnnnnnnnnnnnnnnnnnnnnnnnnnnnnnnnnnnnnnnnnnnnnnnnnnnnnnnnnnnnnnnnnnnnnnnnnnnnnnnnnnnnnnnnnnnnnnnnnnnnnnnnnnnnnnnnnnnnnnnnnnnnnnnnnnnnnnnnnnnnnnnnnnnnnnnnnnnnnnnnnnnnnnnnnnnnnnnnnnnnnnnnnnnnnnnnnnnnnnnnnnnnnnnnnnnnnnnnnnnnnnnnnnnnnnnnnnnnnnnnnnnnnnnnnnnnnnnnnnnnnnnnnnnnnnnnnnnnnnnnnnnnnnnnnnnnnnnnnnnnnnnnnnnnnnnnnnnnnnnnnnnnnnnnnnnnnnnnnnnnnnnnnnnnnnnnnnnnnnnnnnnnnnnnnnnnnnnnnnnnnnnnnnnnnnnnnnnnnnnnnnnnnnnnnnnnnnnnnnnnnnnnnnnnnnnnnnnnnnnnnnnnnnnnnnnnnnnnnnnnnnnnnnnnnnnnnnnnnnnnnnnnnnnnnnnnnnnnnnnnnnnnnnnnnnnnnnnnnnnnnnnnnnnnnnnnnnnnnnnnnnnnnnnnnnnnnnnnnnnnnnnnnnnnnnnnnnnnnnnnnnnnnnnnnnnnnnnnnnnnnnnnnnnnnnnnnnnnnnnnnnnnnnnnnnnnnnnnnnnnnnnnnnnnnnnnnnnnnnnnnnnnnnnnnnnnnnnnnnnnnnnnnnnnnnnnnnnnnnnnnnnnnnnnnnnnnnnnnnnnnnnnnnnnnnnnnnnnnnnnnnnnnnnnnnnnnnnnnnnnnnnnnnnnnnnnnnnnnnnnnnnnnnnnnnnnnnnnnnnnnnnnnnnnnnnnnnnnnnnnnnnnnnnnnnnnnnnnnnnnnnnnnnnnnnnnnnnnnnnnnnnnnnnnnnnnnnnnnnnnnnnnnnnnnnnnnnnnnnnnnnnnnnnnnnnnnnnnnnnnnnnnnnnnnnnnnnnnnnnnnnnnnnnnnnnnnnnnnnnnnnnnnnnnnnnnnnnnnnnnnnnnnnnnnnnnnnnnnnnnnnnnnnnnnnnnnnnnnnnnnnnnnnnnnnnnnnnnnnnnnnnnnnnnnnnnnnnnnnnnnnnnnnnnnnnnnnnnnnnnnnnnnnnnnnnnnnnnnnnnnnnnnnnnnnnnnnnnnnnnnnnnnnnnnnnnnnnnnnnnnnnnnnnnnnnnnnnnnnnnnnnnnnnnnnnnnnnnnnnnnnnnnnnnnnnnnnnnnnnnnnnnnnnnnnnnnnnnnnnnnnnnnnnnnnnnnnnnnnnnnnnnnnnnnnnnnnnnnnnnnnnnnnnnnnnnnnnnnnnnnnnnnnnnnnnnnnnnnnnnnnnnnnnnnnnnnnnnnnnnnnnnnnnnnnnnnnnnnnnnnnnnnnnnnnnnnnnnnnnnnnnnnnnnnnnnnnnnnnnnnnnnnnnnnnnnnnnnnnnnnnnnnnnnnnnnnnnnnnnnnnnnnnnnnnnnnnnnnnnnnnnnnnnnnnnnnnnnnnnnnnnnnnnnnnnnnnnnnnnnnnnnnnnnnnnnnnnnnnnnnnnnnnnnnnnnnnnnnnnnnnnnnnnnnnnnnnnnnnnnnnnnnnnnnnnnnnnnnnnnnnnnnnnnnnnnnnnnnnnnnnnnnnnnnnnnnnnnnnnnnnnnngccgggaactcaaaggagactgccagtgataaactggaggaaggtggggatgacgtcaagtcatcatggcccttacgaccagggctacacacgtgctacaatggcgcatacaaagagaagcgacctcgcgagagcaagcggacctcataaagtgcgtcgtagtccggattggagtctgcaactcgactccatgaagtcggaatcgctagtaatcgtggatcagaatgccacggtgaatacgttcccgggccttgtacacaccgcccgtcacaccatgggagtgggttgcaaaagaagtaggtagcttaaccttcgggagggcgcttaccactttgtgattcatgactggggtgaagtcgtaacaaggtaaccgtaggggaacctgcggttggatcacctccttaccttaaagaagcgttctttgcagtgctcacacagattgtctgatagaaagtgaaaagcaaggcgtcttgcgaagcagactganacgtccccttcgtctagaggcccaggacaccgccctttcacggcggtaacaggggttcgaatcccctaggggacgccacttgctggtttgtgagtgaaagtcacctgccttaatatctcaaaactcatcttcgggtgatgtttgagatatttgctctttaaaaatctggatcaagctgaaaattgaaacactgaacaacgagagttgttcgtgagtctctcaaattttcgcaacacgatgatgaatcgcaagaaacatcttcgggttgtgaggttaagcgactaagcgtacacggtggatgccctggcagtcagaggcgatgaaggacgtgctaatctgcgataagcgtcggtgaggtgatatgaaccgttataaccggcgatttccgaatggggaaacccagtgtgtttcgacacactatcattaactgaatccataggttaatgaggcgaaccgggggaactgaaacatctaagtaccccgaggaaaagaaatcaaccgagattcccccagtagcggcgagcgaacggggaggagcccagagcctgaatcagtgtgtgtgttagtggaagcgtctggaaaggcgngcgatacagggtgacagccccgtacacaaaaatgcacatnntgtgagctcgatgagtagggcgggacacgtggtatcctgtctgaatatggggggaccatcctccaaggctaaatactcctgactgaccgatagtgaaccagtaccgtgagggaaannnnnnnnnnnnnnnnnnnnnnnnnnnnnnnnnnnnnnnnnnnnnnnnnnnnnnnnnnnnnnnnnnnnnnnnnnnnnnnnnnnnnnnnnnnnnnnnnnnnnnnnnnnnnnnnnnnnnnnnnnnnnnnnnnnnnnnnnnnnnnnnnnnnnnnnnnnnnnnnnnnnnnnnnnnnnnnnnnnnnnnnnnnnnnnnnnnnnnnnnnnnnnnnnnnnnnnnnnnnnnnnnnnnnnnnnnnnnnnnnnnnnnnnnnnnnnnnnnnnnnnnnnnnnnnnnnnnnnnnnnnnnnnnnnnnnnnnnnnnnnnnnnnnnnnnnnnnnnnnnnnnnnnnnnnnnnnnnnnnnnnnnnnnnnnnnnnnnnnnnnnnnnnnnnnnnnnnnnnnnnnnnnnnnnnnngtcatcatggcccttacgaccagggctacacacgtgctacaatggcgcatacaaagagaagcganctcgcgagagcaagcggacctcataaagtgcgtcgtagtccggattggagtctgcaactcgactccatgaagtcggaatcgctagtaatcgtggatcagaatgccacggtgaatacgttcccgggccttgtacacaccgcccgtcacaccatgggagtgggttgcaaaagaagtaggtagcttaaccttcgggagggcgcttaccactttgtgattcatgactggggtgaagtcgtaacaaggtaaccgtaggggaacctgcggttggatcacctccttaccttaaagaagcgtactttgcagtgctcacacagattgtctgatgaaaatgagcagtaaaacctctacaggcttgtagctcaggtggttagagcgcacccctgataagggtgaggtcggtggttcaagtccactcaggcctaccaaatttgcaccgcaaatttgaagaggttttaactacatgttatggggctatagctcagctgggagagcgcctgctttgcacgcaggaggtctgcggttcgatcccgcatagctccaccatctctgtagtgattaaataaaaaatacttcagagtgtacctgcaaaggttcactgcgaagttttgctctttaaaaatctggatcaagctgaaaattgaaacactgaacaacgagagttgttcgtgagtctctcaaattttcgcaacacgatgatgaatcgcaagaaacatcttcgggttgtgaggttaagcgactaagcgtacacggtggatgccctggcagtcagaggcgatgaaggacgtgctaatctgcgataagcgtcggtgaggtgatatgaaccgttataaccggcgatttccgaatggggaaacccagtgtgtttcgacacactatcattaactgaatccataggttaatgaggcgaaccgggggaactgaaacatctaagtaccccgaggaaaagaaatcaaccgagattcccccagtagcggcgagcgaacggggaggagcccagagcctgaatcagtgtgtgtgttagtggaagcgtctggaaaggcgtgcgatacagggtgacagccccgtacacaaaaatgcacatattgtgagctcgatgagtagggcgggacacgtggtatcctgtctgaatatggggggaccatcctccaaggctaaatactcctgactgaccgatagtgaaccagtaccgtgagggnnnnnnnnnnnnnnnnnnnnnnnnnnnnnnnnnnnnnnnnnnnnnnnnnnnnnnnnnnnnnnnnnnnnnnnnnnnnnnnnnnnnnnnnnnnnnnnnnnnnnnnnnnnnnnnnnnnnnnnnnnnnnnnnnnnnnnnnnnnnnnnnnnnnnnnnnnnnnnnnnnnnnnnnnnnnnnnnnnnnnnnnnnnnnnnnnnnnnnnnnnnnnnnnnnnnnnnnnnnnnnnnnnnnnnnnnnnnnnnnnnnnnnnnnnnnnnnnnnnnnnnnnnnnnnnnnnnnnnnnnnnnnnnnnnnnnnnnnnnnnnnnnnnnnnnnnnnnnnnnnnnnnnnnnnnnnnnnnnnnnnnnnnnnnnnnnnnnnnnnnnnnnnnnnnnnnnnnnnnnnnnnnnnnnnnnnnnnnnnnnnnnnnnnnnnnnnnnnnnnnnnnnnnnnnnnnnnnnnnnnnnnnnnnnnnnnnnnnnnnnnnnnnnnnnnnnnnnnnnnnnnnngtccccttcgtctagaggcccaggacaccgccctttcacggcggtaacaggggttcgaatcccctaggggacgccacttgctggtttgtgagtgaaagtcacctgccttaatatctcaaaactcatcttcgggtgatgtttgagatatttgctctttaaaaatctggatcaagctgaaaattgaaacactgaacaacgagagttgttcgtgagtctctcaaattttcgcaacacgatgatgaatcgcaagaaacatcttcgggttgtgaggttaagcgactaagcgtacacggtggatgccctggcagtcagaggcgatgaaggacgtgctaatctgcgataagcgtcggtgaggtgatatgaaccgttataaccggcgatttccnnnnnnnnnnnnnnnnnnnnnnnnnnnnnnnnnnnnnnnnnnnnnnnnnnnnnnnnnnnnnnnnnnnnnnnnnnnnnnnnnnnnnnnnnnnnnnnnnnnnnnnnnnnnnnnnnnnnnnnnnnnnnnnnnnnnnnnnnnnnnnnnnnnnnnnnnnnnnnnnnnnnnnnnnnnnnnnnnnnnnnnnnnnnnnnnnnnnnnnnnnnnnnnnnnnnnnnnnnnnnnnnnnnnnnnnnnnnnnnnnnnnnnnnnnnnnnnnnnnnnnnnnnnnnnnnnnnnnnnnnnnnnnnnnnnnnnnnnnnnnctccaaggctaaatactcctgactgaccgatagtgaaccagtaccgtgagggnnnnnnnnnnnnnnnnnnnnnnnnnnnnnnnnnnnnnnnnnnnnnnnnnnnnnnnnnnnnnnnnnnnnnnnnnnnnnnnnnnnnnnnnnnnnnnnnnnnnnnnnnnnnnnnnnnnnnnnnnnnnnnnnnnnnnnnnnnnnnnnnnnnnnnnnnnnnnnnnnnnnnnnnnnnnnnnnnnnnnnnnnnnnnnnnnnnnnnnnnnnnnnnnnnnnnnnnnnnnnnnnnnnnnnnnnnnnnnnnnnnnnnnnnnnnnnnnnnnnnnnnnnnnnnnnnnnnnnnnnnnnnnnnnnnnnnnnnnnnnnnnnnnnnnnnnnnnnnnnnnnnnnnnnnnnnnnnnnnnnnnnnnnnnnnnnnnnnnnnnnnnnnnnnnnnnnnnnnnnnnnnnnnnnnnnnnnnnnnnnnnnnnnnnnnnnnnnnnnnnnnnnnnnnnnnnnnnnnnnnnnnnnnnnnnnnnnnnnnnnnnnnnnnnnnnnnnnnnnnnnnnnnnnnnnnnnnnnnnnnnnnnnnnnnnnnnnnnnnnnnnnnnnnnnnnnnnnnnnnnnnnnnnnnnnnnnnnnnnnnnnnnnnnnnnnnnnnnnnnnnnnnnnnnnnnnnnnnnnnnnnnnnnnnnnnnnnnnnnnnnnnnnnnnnntttgctctttaaaaatctggatcaagctgaaaattgaaacactgaacaacgagagttgttcgtgagtctctcaaattttcgcaacacgatgatgaatcgcaagaaacatcttcgggttgtgaggttaagcgactaagcgtacacggtggatgccctggcagtcagaggcgatgaaggacgtgctaatctgcgataagcgtcggtgaggtgatatgaaccgttataaccggcgatttccgaatggggaaacccagtgtgtttcgacacactatcattaactgaatccataggttaatgaggcgaaccgggggaactgaaacatctaagtaccccgaggaaaagaaatcaaccgagattcccccagtagcggcgagcgaacggggaggagcccagagcctgaatcagtgtgtgtgttagtggaagcgtctggaaaggcgtgcgatacagggtgacagccccgtacacaaaaatgcacatattgtgagctcgatgagtagggcgggacacgtggtatcctgtctgaatatggggggaccatcctccaaggctaaatactcctgactgaccgatagtgaaccagtaccgtgagggaaaggcgaaaagaaccccggcgaggggagtgaaaaagaacctgaaaccgtgtacgtacaagcagtgggagcctcttaatggggtgactgcgtaccttttgtataatgggtcagcgacttatattctgtagcaaggttaaccgaataggggagccgaagggaaaccgagtcttaactgggcgttaagttgcagggtatagacccgaaacccggtgatctagccatgggcaggttgaaggttgggtaacactaactggaggaccgaaccgactaatgttgaaaaattagcggatgacttgtggctgggggtgaaaggccaatcaaaccgggagatagctggttctccccgaaagctatttaggtagcgcctcgtgaattcatctccgggggtagagcactgtttcggcaagggggtcatcccgacttaccaacccgatgcaaactgcgaataccggagaatgttatcacgggagacacacggcgggtgctaacgtccgtcgtgaagagggaaacaacccagaccgccagctaaggtcccaaagtcatggttaagtgggaaacgatgtgggaaggcccagacagccaggatgttggcttagaagcagccatcatttaaagaaagcgtaatagctcactggtcgagtcggcctgcgcggaagatgtaacggggctaaaccatgcaccgaagctgcggcagcgacactatgtgttgttgggtaggggagcgttctgtaagcctgtgaaggtggcctgtgagggttgctggaggtatcagaagtgcgaatgctgacataagtaacgataaagcgggtgaaaagcccgctcgccggaagaccaagggttcctgtccaacgttaatcggggcagggtgagtcgacccctaaggcgaggccgaaaggcgtagtcgatgggaaacaggttaatattcctgtacttggtgttactgcgaaggggggacggagaaggctatgttggccgggcgacggttgtcccggtttaagcgtgtaggctggttttccaggcaaatccggaaaaccaaggctgaggcgtgatgacgaggcactacggtgctgaagngacaaatgccctgcttccaggaaaagcctctaagcatcaggtaacatcaaatcgtaccccaaaccgacacaggtggtcaggtagagaataccaaggcgcttgagagaactcgggtgaaggaactaggcaaaatggtgccgtaacttcgggagaaggcacgctgatatgtaggtgaagcgacttgctcgtggagctgaaatcagtcgaagataccagctggctgcaactgtttattaaaaacacagcactgtgcaaacacgaaagtggacgtatacggtgtgacgcctgcccggtgccggaaggttaattgatggggttagcggtaacgcgaagctcttgatcgaagccccggtaaacggcggccgtaactataacggtcctaaggtagcgaaattccttgtcgggtaagttccgacctgcacgaatggcgtaatgatggccaggctgtctccacccgagactcagtgaaattgaactcgctgtgaagatgcagtgtacccgcggcaagacggaaagaccccgtgaacctttactatagcttgacactgaacattgagccttgatgtgtaggatagnnnnnnnnnnnnnnnnnnnnnnnnnnnnnnnnnnnnnnnnnnnnnnnnnnnnnnnnnnnnnnnnnnnnnnnnnnnnnnnnnnnnnnnnnnnnnnnnnnnnnnnnnnnnnnnnnnnnnnnnnnnnnnnnnnnnnnnnnnnnnnnnnnnnnnnnnnnnnnnnnnnnnnnnnnnnnnnnnnnnnnnnnnnnnnnnnnnnnnnnnnnnnnnnnnnnnnnnnnnnnnnnnnnnnnnnnnnnnnnnnnnnnnnnnnnnnnnnnnnnnnnnnnnnnnnnnnnnnnnnnnnnnnnnnnnnnnnnnnnnnnnnnnnnnnnnnnnnnnnnnnnnnnnnnnnnnnnnnnnnnnnnnnnnnnnnnnnnnnnnnnnnnnnnnnnnnnnnnnnnnnnnnnnnnnnnnnnnnnnnnnnnnnnnnnnnnnnnnnnnnnnnnnnnnnnnnnnnnnnnnnnnnnnnnnnnnnnnnnnnnnnnnnnnnnnnnnnnnnnnnnnnnnnnnnnnnnnnnnnnnnnnnnnnnnnnnnnnnnnnnnnnnnnnnnnnnnnnnnnnnnnnnnnnnannnnnnnnnnnnnnnnnnnnngnnnnnnnnnnnnnnnnnnnnnnnnnnnnnnnnnnnnnnnnnnnnnnnnnnnnnnnnnnnnnnnnnnnnnnnnnnnnnnnnnnnnnnnnnnnnnnnnnnnnnnnnnnnnnnnnnnnnnnnnnnnnnnnnnnnnnnnnnnnnnnnnnnnnnnnnnnnnnnnnnnnnnnnnnnnnnaaaaagttctgcaagatcttgttctgcaactccacccacgttcaacctggcattcttttttgccagcaaaacgtatggatattgttgtgagcgcgctggaaatgaatgagggcggtttgtcacaggttgaggaacgcattcttcatgaagtggtcgcaggggcaacgttaatgaaatatcgccagttccacatccatgcgcaatcagtggtactcagtgatagtgcggtcctggcaatgtttaagcagaaataatcatgtcaccattggtgggtacgaaacctaaagttcagcccaccgggatgagaaaaaaaccgcctacacccccacatatgccagattcagcaacggatacggtttccccaaatcgtccacctcagagcgttccgtaaccttaaagcccaccttcttatagaacccaaccgcctgctcattttgctcattaacattggttgtcagttccggggccattgagagcgcatgcttcaccagcatccggcccacgccgcagccgcgcacatcaggatcgataaacagcgcatccatatgctgcccacttaacaacataaacccaaccggctgatcccgctcattaaccgcgacccacaacggtgcttccggcagaaaggaatgcaccagctcttccagctcggcccgatactctgctgataaaaaatcgtgagtggcatcgacagaacgacaccaaatcgcaacgagttcctccccctcctcatgccgtgagcggcgaatactaataaccattttctctccttttcgtcattcttatattctaacgtagccttttccttgaaactttctcaccttcaacatgcaggctcgacattggtaaattttctggttatcttcagctatctggatgtctaaacgtataagcgtatatagtgaggtaatcaggttatgccgattcgtgtgccggacgagctacccgccgtcaatttcttgcgtgaagaaaacgtctttgtgatgacaacttctcgcgcgtctggtcaggaaattcgtccgctaaaggtgcttatccttaacctgatgccgaagaagatcgaaactgaaaatcagtttctgcgcctgctttcaaactcacctttgcaggtcgatattcagcttttgcgcatcgattcccgtgaatcgcgcaacacgcccgcagagcatctgaataacttctactgtaactttgaagatattcaggaacaaaactttgacggtctgatagttaccggcgcgccactgggcctggtggagtttaatgatgtcgcttactggccgcagatcaaacaggtgctggagtggtcgaaagatcacgtcacctcgacgctgtttgtctgctgggctgtacaggccgcgctcaatatcctctatggtattcctaagcaaacccgcaccgacaaactctctggcgtttacgagcatcatattctccatcctcatgcgcttctgacgcgtggctttgatgattcattcctggcaccgcattcgcgctatgctgactttccggcagcgttgattcgtgattataccgatctggaaattctggcagagacggaagaaggggatgcatatctgtttgccagcaaagataagcgcattgcctttgtgacgggccatcccgaatatgatgcgcaaacgctggcgcaggaatatttccgcgatgtggaagccgggctagacccggatgtaccgtataactatttcccgcacaatgatccgcaaaatacaccgcgagcgagctggcgtagtcacggtaatttgctgtttaccaactggctcaactattacgtctaccagatcacgccatatgatctacggcacatgaatccaacgctggattaatcttctgtgatagtcgatcgttaagcgattcagcaccttacctcaggcaccttcgggtgccttttttatttccgaaacacacctcagtaagtgaataaattttatttatattgttatcaataagttaacatgtatttttaattaaaatggaaattgtttttgattttgcattttaaatgagtagtcttagttgtgctgaacgaaaagcgcacaacgatccttcgttcacagtggggaagttttcggatccatgacgaggagctgcacgatgactgaacaggcaacaacaatcgatgaactggcttttacaaggccgtatggcgagcaggagaagcaaattcttactgccgaagcggtagaatttctgactgagctggtgacgcattttacgccacaacgcaataaacttctggcagcgcgtattcagcagcagcaggatatcgataacggaatgttgcctgattttatttcggaaacagcttccattcgttatgctgactggaaaattcgcgggattccttcggacttagaagatcgtcgcgtagagattaccggacctgtagagcgcaagatggtgatcaacgcgctcaacgccaatgtgaaagtctttatggccgatttcgaagattcactggcaccagactggaacaaagtgatcgatgggcaaattaacctgcgcgatgcggttaacggcaccatcagctatagcaatgaagcaggcaaaatttatcagctcaagcccaatccagcggttttgatttgtcgggtacgcggtctgcacttgccggaaaaacatgtcacctggcgtggtgagacaatccccggtagcctgtttgattttgcgctctatttcttccacaactatcaggcactgttggcaaagggcagcggtccctatttctatctgccgaaaacccagtcctggcaggaagcggcctggtggagcgaagtcttcagctatgcagaagatcgctttaatctgccgcgcggcaccatcaaggcgacgttgctgattgaaacgctgcccgccgtgttccagatggatgaaatccttcacgcgctgcgtgaccatattgttggtctgaactgcggtcgttgggattacatcttcagttatatcaaaacattgaaaaactatcccgatcgcgtcctgccagacagacaggcagtgacgatggataaacccttcctgaatgcttactcacgcctgttgattaaaacctgccataaacgcggtgcttttgcgatgggcggcatggcggcgtttattccgagcaaagatgaagagcgcaataaccaggtgctcgacaaagtaaaagcggataaatcgctggaagccaataacggtcacgatggcacatggatcgctcacccgggccttgctgatacggcaatggcggtattcaacgatattctcggctcccgcaaaaaccagcttgaggtgatgcgcgaacaagacgcgccgattactgccgatcagctgctggcaccttgtgctggtgaacgcaccgaagaaggtatgcgcgccaacattcgcgtggctgtgcagtacatcgaagcgtggatctctggcaatggctgtgtgccgatttatggcctgatggaagatgcggcgacggctgaaatttcccgtacctcaatctggcagtggatccatcatcaaaaaacgttgagcaatggcaaaccggtgactaaagccttgttccgccagatgctgggcgaagagatgaaagtcattgccagcgaactgggcgaagaacgtttctcccatgggcgttttgacgatgccgcacgcttgatggaacagatcaccacttccgatgagttaattgatttcctgaccctgccaggctaccgcctgttagcgtaaaccaccacataactatggagcatctgcacatgaaaacccgtacacaacaaattgaagaattacagaaagagtggactcaaccgcgttgggaaggcattactcgcccgtacagcgcggaagatgtggtgaaattacgcggttcagtcaatccggaatgcaccctggcgcaactgggtgcggcgaaaatgtggcgtctgctgcacggcgagtcgaaaaaaggctacatcaacagcctcggtgcactgactggcggtcaggcgctgcaacaggcgaaagcgggtattgaagcagtctatctgtcgggatggcaggtagcggcggacgctaacctggcggccagcatgtatccggatcagtcgctctatccggcaaactcggtgccagcggtggtggagcggatcaacaatactttccgccgtgcggatcagatccaatggtccgcgggcattgagccgggcgatccgcgctatgtcgattacttcctgccgatcgtcgccgatgcggaggccggttttggcggtgtactgaatgcctttgaactgatgaaagcgatgattgaagccggtgcagcggcagttcacttcgaagatcagctggcatcagtgaagaaatgtggtcacatgggcggcaaagttttggtgccaactcaggaagctattcagaaactggtcgcggcgcgtctggcagctgatgtgacgggcgttccaaccctgctggttgctcgtaccgatgccgatgcggcggatctgattacctccgattgcgacccatatgacagcgaatttattactggcgagcgtaccagtgaaggcttcttccgtactcatgcgggtattgagcaagcgatcagccgtggcctggcgtatgcgccatatgctgacctggtatggtgtgaaacctccacgccggacctagaactggcgcgtcgctttgcacaagccatccacgcgaaatatccgggcaaactgctggcttataactgctcgccgtcgttcaactggcagaaaaacctcgacgacaaaactattgccagcttccagcagcagctgtcggatatgggctacaagttccagttcatcaccctggcaggtatccacagcatgtggttcaacatgtttgacctggcaaacgcctatgcccagggcgagggtatgaagcactatgttgagaaagtgcagcagccggaatttgccgccgcgaaagatggctannnnnnnnnnnnnnnnnnnnnnnnnnngnnnnnnnnnnnnnnnnnnnnnnnnnnnnnnnnnnnnnnnnnnnnnnnnnnnnnnnnnnnnnnnnnnnnnnnnnnnnnnnnnnnnnnnnnnnnnnnnnnnnnnnnnnnnnnnnnnnnnnnnnnnnnnnnnnnnnnnnnnnnnnnnnnnnnnnnnnnnnnnnnnnnnnnnnnnnnnnnnnnnnnnnnnnnnnnnnnnnnnnnnnnnnnnnnnnnnnnnnnnnnnnnnnnnnnnnnnnnnnnnnnnnnnnnnnnnnnnnnnnnnnnnnnnnnnnnnnnnnnnnnnnnnnnnnnnnnnnnnnnnnnnnnnnnnnnnnnnnnnnnnnnnnnnnnnnnnnnnnnnnnnnnnnnnnnnnnnnnnnnnnnnnnnnnnnnnnnnnnnnnnnnnnnnnnnnnnnnnnnnnnnnnnnnnnnnnnnnnnnnnnnnnnnnnnnnnnnnnnnnnnnnnnnnnnnnnnnnnnnnnnnnnnnnnnnnnnnnnnnnnnnnnnnnnnnnnnnnnnnnnnnnnnnnnnnnnnnnnnnnnnnnnnnnnnnnnnnnnnnnnnnnnnnnnnnnnnnnnnnnnnnnnnnnnnnnnnnnnnnnnnnnnnnnnnnnnnnnnnnnnnnnnnnnnnnnnnnnnnnnnnnnnnnnnnnnnnnnnnnnnnnnnnnnnnnnnnnnnnnnnnnnnnnnnnnnnnnnnnnnnnnnnnnnnnnnnnnnnnnnnnnnnnnnnnnnnnnnnnnnnnnnnnnnnnnnnnnnnnnnnnnnnnnnnnnnnnnnnnnnnnnnnnnnnnnnnnnnnnnnnnnnnnnnnnnnnnnnnnnnnnnnnnnnnnnnnnnnnnnnnnnnnnnnnnnnnnnnnnnnnnnnnnnnnnnnnnnnnnnnnnnnnnnnnnnnnnnnnnnnnnnnnnnnnnnnnnnnnnnnnnnnnnnnnnnnnnnnnnnnnnnnnnnnnnnnnnnnnnnnnnnnnnnnnnnnnnnnnnnnnnnnnnnnnnnnnnnnnnnnnnnnnnnnnnnnnnnnnnnnnnnnnnnnnnnnnnnnnnnnnnnnnnnnnnnnnnnnnnnnnnnnnnnnnnnnnnnnnnnnnnnnnnnnnnnnnnnnnnnnnnnnnnnnnnnnnnnnnnnnnnnnnnnnnnnnnnnnnnnnnnnnnnnnnnnnnnnnnnnnnnnnnnnnnnnnnnnnnnnnnnnnnnnnnnnnnnnnnnnnnnnnnnnnnnnnnnnnnnnnnnnnnnnnnnnnnnnnnnnnnnnnnnnnnnnnnnnnnnnnnnnnnnnnnnnnnnnnnnnnnnnnnnnnnnnnnnnnnnnnnnnnnnnnnnnnnnnnnnnnnnnnnnnnnnnnnnnnnnnnnnnnnnnnnnnnnnnnnnnnnnnnnnnnnnnnnnnnnnnnnnnnnnnnnnnnnnnnnnnnnnnnnnnnnnnnnnnnnnnnnnnnnnnnnnnnnnnnnnnnnnnnnnnnnnnnnnnnnnnnnnnnnnnnnnnnnnnnnnnnnnnnnnnnnnnnnnnnnnnnnnnnnnnnnnnnnnnnnnnnnnnnnnnnnnnnnnnnnnnnnnnnnnnnnnnnnnnnnnnnnnnnnnnnnnnnnnnnnnnnnnnnnnnnnnnnnnnnnnnnnnnnnnnnnnnnnnnnnnnnnnnnnnnnnnnnnnnnnnnnnnnnnnnnnnnnnnnnnnnnnnnnnnnnnnnnnnnnnnnnnnnnnnnnnnnnnnnnnnnnnnnnnnnnnnnnnnnnnnnnnnnnnnnnnnnnnnnnnnnnnnnnnnnnnnnnnnnnnnnnnnnnnnnnnnnnnnnnnnnnnnnnnnnnnnnnnnnnnnnnnnnnnnnnnnnnnnnnnnnnnnnnnnnnnnnnnnnnnnnnnnnnnnnnnnnnnnnnnnnnnnnnnnnnnnnnnnnnnnnnnnnnnnnnnnnnnnnnnnnnnnnnnnnnnnnnnnnnnnnnnnnnnnnnnnnnnnnnnnnnnnnnnnnnnnnnnnnnnnnnnnnnnnnnnnnnnnnnnnnnnnnnnnnnnnnnnnnnnnnnnnnnnnnnnnnnnnnnnnnnnnnnnnnnnnnnnnnnnnnnnnnnnnnnnnnnnnnnnnnnnnnnnnnnnnnnnnnnnnnnnnnnnnnnnnnnnnnnnnnnnnnnnnnnnnnnnnnnnnnnnnnnnnnnnnnnnnnnnnnnnnnnnnnnnnnnnnnnnnnnnnnnnnnnnnnnnnnnnnnnnnnnnnnnnnnnnnnnnnnnnnnnnnnnnnnnnnnnnnnnnnnnnnnnnnnnnnnnnnnnnnnnnnnnnnnnnnnnnnnnnnnnnnnnnnnnnnnnnnnnnnnnnnnnnnnnnnnnnnnnnnnnnnnnnnnnnnnnnnnnnnnnnnnnnnnnnnnnnnnnnnnnnnnnnnnnnnnnnnnnnnnnnnnnnnnnnnnnnnnnnnnnnnnnnnnnnnnnnnnnnnnnnnnnnnnnnnnnnnnnnnnnnnnnnnnnnnnnnnnnnnnnnnnnnnnnnnnnnnnnnnnnnnnnnnnnnnnnnnnnnnnnnnnnnnnnnnnnnnnnnnnnnnnnnnnnnnnnnnnnnnnnnnnnnnnnnnnnnnnnnnnnnnnnnnnnnnnnnnnnnnnnnnnnnnnnnnnnnnnnnnnnnnnnnnnnnnnnnnnnnnnnnnnnnnnnnnnnnnnnnnnnnnnnnnnnnnnnnnnnnnnnnnnnnnnnnnnnnnnnnnnnnnnnnnnnnnnnnnnnnnnnnnnnnnnnnnnnnnnnnnnnnnnnnnnnnnnnnnnnnnnnnnnnnnnnnnnnnnnnnnnnnnnnnnnnnnnnnnnnnnnnnnnnnnnnnnnnnnnnnnnnnnnnnnnnnnnnnnnnnnnnnnnnnnnnnnnnnnnnnnnnnnnnnnnnnnnnnnnnnnnnnnnnnnnnnnnnnnnnnnnnnnnnnnnnnnnnnnnnnnnnnnnnnnnnnnnnnnnnnnnnnnnnnnnnnnnnnnnnnnnnnnnnnnnnnnnnnnnnnnnnnnnnnnnnnnnnnnnnnnnnnnnnnnnnnnnnnnnnnnnnnnnnnnnnnnnnnnnnnnnnnnnnnnnnnnnnnnnnnnnnnnnnnnnnnnnnnnnnnnnnnnnnnnnnnnnnnnnnnnnnnnnnnnnnnnnnnnnnnnnnnnnnnnnnnnnnnnnnnnnnnnnnnnnnnnnnnnnnnnnnnnnnnnnnnnnnnnnnnnnnnnnnnnnnnnnnnnnnnnnnnnnnnnnnnnnnnnnnnnnnnnnnnnnnnnnnnnnnnnnnnnnnnnnnnnnnnnnnnnnnnnnnnnnnnnnnnnnnnnnnnnnnnnnnnnnnnnnnnnnnnnnnnnnnnnnnnnnnnnnnnnnnnnnnnnnnnnnnnnnnnnnnnnnnnnnnnnnnnnnnnnnnnnnnnnnnnnnnnnnnnnnnnnnnnnnnnnnnnnnnnnnnnnnnnnnnnnnnnnnnnnnnnnnnnnnnnnnnnnnnnnnnnnnnnnnnnnnnnnnnnnnnnnnnnnnnnnnnnnnnnnnnnnnnnnnnnnnnnnnnnnnnnnnnnnnnnnnnnnnnnnnnnnnnncnnnnnnnnnnnnnnnnnnnnnnnnnnnnnnnnnnnnnnnnnnnnnnnnnnnnnnnnnnnnnnnnnnnnnnnnnnnnnnnnnnnnnnnnnnnnnnnnnnnnnnnnnnnnnnnnnnnnnnnnnnnnnnnnnnnnnnnnnnnnnnnnnnnnnnnnnnnnnnnnnnnnnnnnnnnnnnnnnnnnnnnnnnnnnnnnnnnnnnnnnnnnnnnnnnnnnnnnnnnnnnnnnnnnnnnnnnnnnnnnnnnnnnnnnnnnnnnnnnnnnnnnnnnnnnnnnnnnnnnnnnnnnnnnnnnnnnnnnnnnnnnnnnnnnnnnnnnnnnnnnnnnnnnnnnnnnnnnnnnnnnnnnnnnnnnnnnnnnnnnnnnnnnnnnnnnnnnnnnnnnnnnnnnnnnnnnnnnnnnnnnnnnnnnnnnnnnnnnnnnnnnnnnnnnnnnnnnnnnnnnnnnnnnnnnnnnnnnnnnnnnnnnnnnnnnnnnnnnnnnnnnnnnnnnnnnnnnnnnnnnnnnnnnnnnnnnnnnnnnnnnnnnnnnnnnnnnnnnnnnnnnnnnnnnnnnnnnnnnnnnnnnnnnnnnnnnnnnnnnnnnnnnnnnnnnnnnnnnnnnnnnnnnnnnnnnnnnnnnnnnnnnnnnnnnnnnnnnnnnnnnnnnnnnnnnnnnnnnnnnnnnnnnnnnnnnnnnnnnnnnnnnnnnnnnnnnnnnnnnnnnnnnnnnnnnnnnnnnnnnnnnnnnnnnnnnnnnnnnnnnnnnnnnnnnnnnnnnnnnnnnnnnnnnnnnnnnnnnnnnnnnnnnnnnnnnnnnnnnnnnnnnnnnnnnnnnnnnnnnnnnnnnnnnnnnnnnnnnnnnnnnnnnnnnnnnnnnnnnnnnnnnnnnnnnnnnnnnnnnnnnnnnnnnnnnnnnnnnnnnnnnnnnnnnnnnnnnnnnnnnnnnnnnnnnnnnnnnnnnnnnnnnnnnnnnnnnnnnnnnnnnnnnnnnnnnnnnnnnnnnnnnnnnnnnnnnnnnnnnnnnnnnnnnnnnnnnnnnnnnnnnnnnnnnnnnnnnnnncnnnnnnnnnnnnnnnnnnnnnnnnnnnnnnnnnnnnnnnnnnnnnnnnnnnnnnnnnnnnnnnnnnnnnnnnnnnnnnnnnnnnnnnnnnnnnnnnnnnnnnnnnnnnnnnnnnnnnnnnnnnnnnnnnnnnnnnnnnnnnnnnnnnnnnnnnnnnnnnnnnnnnnnnnnnnnnnnnnnnnnnnnnnnnnnnnnnnnnnnnnnnnnnnnnnnnnnnnnnnnnnnnnnnnnnnnnnnnnnnnnnnnnnnnnnnnnnnnnnnnnnnnnnnnnnnnnnnnnnnnnnnnnnnnnnnnnnnnnnnnnnnnnnnnnnnnnnnnnnnnnnnnnnnnnnnnnnnnnnnnnnnnnnnnnnnnnnnnnnnnnnnnnnnnnnnnnnnnnnnnnnnnnnnnnnnnnnnnnnnnnnnnnnnnnnnnnnnnnnnnnnnnnnnnnnnnnnnnnnnnnnnnnnnnnnnnnnnnnnnnnnnnnnnnnnnnnnnnnnnnnnnnnnnnnnnnnnnnnnnnnnnnnnnnnnnnnnnnnnnnnnnnnnnnnnnnnnnnnnnnnnnnnnnnnnnnnnnnnnnnnnnnnnnnnnnnnnnnnnnnnnnnnnnnnnnnnnnnnnnnnnnnnnnnnnnnnnnnnnnnnnnnnnnnnnnnnnnnnnnnnnnnnnnnnnnnnnnnnnnnnnnnnnnnnnnnnnnnnnnnnnnnnnnnnnnnnnnnnnnnnnnnnnnnnnnnnnnnnnnnnnnnnnnnnnnnnnnnnnnnnnnnnnnnnnnnnnnnnnnnnnnnnnnnnnnnnnnnnnnnnnnnnnnnnnnnnnnnnnnnnnnnnnnnnnnnnnnnnnnnnnnnnnnnnnnnnnnnnnnnnnnnnnnnnnnnnnnnnnnnnnnnnnnnnnnnnnnnnnnnnnnnnnnnnnnnnnnnnnnnnnnnnnnnnnnnnnnnnnnnnnnnnnnnnnnnnnnnnnnnnnnnnnnnnnnnnnnnnnnnnnnnnnnnnnnnnnnnnnnnnnnnnnnnnnnnnnnnnnnnnnnnnnnnnnnnnnnnnnnnnnnnnnnnnnnnnnnnnnnnnnnnnnnnnnnnnnnnnnnnnnnnnnnnnnnnnnnnnnnnnnnnnnnnnnnnnnnnnnnnnnnnnnnnnnnnnnnnnnnnnnnnnnnnnnnnnnnnnnnnnnnnnnnnnnnnnnnnnnnnnnnnnnnnnnnnnnnnnnnnnnnnnnnnnnnnnnnnnnnnnnnnnnnnnnnnnnnnnnnnnnnnnnnnnnnnnnnnnnnnnnnnnnnnnnnnnnnnnnnnnnnnnnnnnnnnnnnnnnnnnnnnnnnnnnnnnnnnnnnnnnnnnnnnnnnnnnnnnnnnnnnnnnnnnnnnnnnnnnnnnnnnnnnnnnnnnnnnnnnnnnnnnnnnnnnnnnnnnnnnnnnnnnnnnnnnnnnnnnnnnnnnnnnnnnnnnnnnnnnnnnnnnnnnnnnnnnnnnnnnnnnnnnnnnnnnnnnnnnnnnnnnnnnnnnnnnnnnnnnnnnnnnnnnnnnnnnnnnnnnnnnnnnnnnnnnnnnnnnnnnnnnnnnnnnnnnnnnnnnnnnnnnnnnnnnnnnnnnnnnnnnnnnnnnnnnnnnnnnnnnnnnnnnnnnnnnnnnnnnnnnnnnnnnnnnnnnnnnnnnnnnnnnnnnnnnnnnnnnnnnnnnnnnnnnnnnnnnnnnnnnnnnnnnnnnnnnnnnnnnnnnnnnnnnnnnnnnnnnnnnnnnnnnnnnnnnnnnnnnnnnnnnnnnnnnnnnnnnnnnnnnnnnnnnnnnnnnnnnnnnnnnnnnnnnnnnnnnnnnnnnnnnnnnnnnnnnnnnnnnnnnnnnnnnnnnnnnnnnnnnnnnnnnnnnnnnnnnnnnnnnnnnnnnnnnnnnnnnnnnnnnnnnnnnacctttgtgaaacgcgatccgcaagaggctgagcgccttgcagcggaagagcaagcgcagcgtgaagcggaagagcaagcccgtcgtgaggcagaagaatcggctaaacgcgaggcgcaacaaaaagctgaacgtgaggccgcagaacaggctaagcgtgaagctgctgaacaagcgaaacgtgaagctgcggaaaaagacaaagtgagcaatcaacaagacgatatgactaaaaacgcccaggctgaaaaagcccgccgtgagcaggaagctgcagagctcaagcgtaaagccgaagaagaagcgcgtcgtaaactcgaagaagaagcacgtcgcgttgctgaagaagcacgtcgtatggcggaagaaaacaaatggactgataacgcggaaccgactgaagattccagcgattatcacgtcactacttctcaacatgctcgccaggcagaagacgaaagcgatcgtgaagtcgaaggcggccgtggccgtggtcgtaacgcgaaagcagcgcgtccgaagaagggcaacaaacacgctgaatcaaaagctgatcgtgaagaagctcgcgcagcagtacgtggcggtaagggcggaaaacgtaaaggttcttcgctgcagcaaggcttccagaagccagctcaggccgttaaccgtgacgttgtgatcggcgaaaccatcaccgttggcgaactggcgaacaagatggcggttaaaggctctcaggtcatcaaagcgatgatgaaactgggcgcaatggcaaccatcaaccaggttatcgatcaggaaaccgcacagctggttgctgaagagatgggccacaaagttatcctgcgtcgtgaaaacgagctggaagaggcggtaatgagcgaccgtgacacgggtgctgcggctgaaccgcgcgcgccggttgtgaccatcatgggtcacgttgaccacggtaaaacctctctgctggactacattcgttcaacgaaagtggcctctggcgaagcgggcggcattacccagcacattggtgcataccacgttgaaactgaaaacggcatgatcaccttcctggacaccccggggcacgccgcgtttacttcaatgcgtgcacgtggtgcgcaggcaacggacatcgtagtcctggttgttgctgcagacgacggtgtaatgccgcagaccatcgaagctatccagcacgcgaaagcggcgggtgttccggtggtggttgctgtgaacaaaatcgataaaccagaagccgatccggatcgcgttaagaacgaactctcccagtacggcatcctgccagaagagtggggcggcgaaagccagttcgtacacgtatctgcaaaagcgggtaccggtattgatgaactgctggatgctatcctgctgcaggcggaagttctggagctgaaagcggtacgtaaaggtatggcgagcggtgcggttatcgaatccttcctcgataaaggtcgtggtccggttgctaccgttctggtacgtgaaggtactctgcacaagggcgatatcgttctgtgtggcttcgaatacggtcgtgttcgtgcaatgcgtaacgaactgggtcaggaagtgctggaagcgggtccgtccattccggtggaaatccttggcctgtccggcgtaccggctgcgggtgatgaagttaccgttgtacgtgacgagaagaaagcgcgtgaagttgcactctatcgtcagggtaaattccgcgaagttaaactggcgcgtcagcagaaatctaaactcgagaacatgttcgccaacatgaccgaaggcgaagttcacgaagtgaatattgtcctgaaggcagacgtacagggttctgtggaagcaatttccgactccttgctgaaactgtctactgacgaagttaaagtgaagatcatcggttctggcgtaggtggtatcaccgaaaccgacgctaccctggctgcggcgtccaacgccatcctggttggcttcaacgtacgtgctgatgcctctgcacgtaaagtgattgaagcggaaagcctggatctgcgttactactccgtcatctataacctgatcgacgaagtgaaagcnnnnnnnnnnnnnnnnnnnnnnnnnnnnnnnnnnnnnnnnnnnnnnnnnnnnnnnnnnnnnnnnnnnnnnnnnnnnnnnnnnnnnnnnnnnnnnnnnnnnnnnnnnnnnnnnnnnnnnnnnnnnnnnnnnnnnnnnnnnnnnnnnnnnnnnnnnnnnnnnnnnnnnnnnnnnnnnnnnnnnnnnnnnnnnnnnnnnnnnnnnnnnnnnnnnnnnnnnnnnnnnnnnnnnnnnnnnnnnnnnnnnnnnnnnnnnnnnnnnnnnnnnnnnnnnnnnnnnnnnnnnnnnnnnnnnnnnnnnnnnnnnnnnnnnnnnnnnnnnnnnnnnnnnnnnnnnnnnnnnnnnnnnnnnnnnnnnnnnnnnnnnnnnnnnnnnnnnnnnnnnnnnnnnnnnnnnnnnnnnnnnnnnnnnnnnnnnnnnnnnnnnnnnnnnnnnnnnnnnnnnnnnnnnnnnnnnnnnnnnnnnnnnnnnnnnnnnnnnnnnnnnnnnnnnnnnnnnnnnnnnnnnnnnnnnnnnnnnnnnnnnnnnnnnnnnnnnnnnnnnnnnnnnnnnnnnnnnnnnnnnnnnnnnnnnnnnnnnnnnnnnnnnnnnnnnnnnnnnnnnnnnnnnnnnnnnnnnnnnnnnnnnnnnnnnnnnnnnnnnnnnnnnnnnnnnnnnnnnnnnnnnnnnnnnnnnnnnnnnnnnnnnnnnnnnnnnnnnnnnnnnnnnnnnnnnnnnnnnnnnnnnnnnnnnnnnnnnnnnnnnnnnnnnnnnnnnnnnnnnnnnnnnnnnnnnnnnnnnnnnnnnnnnnnnnnnnnnnnnnnnnnnnnnnnnnnnnnnnnnnnnnnnnnnnnnnnnnnnnnnnnnnnnnnnnnnnnnnnnnnnnnnnnnnnnnnnnnnnnnnnnnnnnnnnnnnnnnnnnnnnnnnnnnnnnnnnnnnnnnnnnnnnnnnnnnnnnnnnnnnnnnnnnnnnnnnnnnnnnnnnnnnnnnnnnnnnnnnnnnnnnnnnnnnnnnnnnnnnnnnnnnnnnnnnnnnnnnnnnnnnnnnnnnnnnnnnnnnnnnnnnnnnnnnnnnnnnnnnnnnnnnnnnnnnnnnnnnnnnnnnnnnnnnnnnnnnnnnnnnnnnnnnnnnnnnnnnnnnnnnnnnnnnnnnnnnnnnnnnnnnnnnnnnnnnnnnnnnnnnnnnnnnnnnnnnnnnnnnnnnnnnnnnnnnnnnnnnnnnnnnnnnnnnnnnnnnnnnnnnnnnnnnnnnnnnnnnnnnnnnnnnnnnnnnnnnnnnnnnnnnnnnnnnnnnnnnnnnnnnnnnnnnnnnnnnnnnnnnnnnnnnnnnnnnnnnnnnnnnnnnnnnnnnnnnnnnnnnnnnnnnnnnnnnnnnnnnnnnnnnnnnnnnnnnnnnnnnnnnnnnnnnnnnnnnnnnnnnnnnnnnnnnnnnnnnnnnnnnnnnnnnnnnnnnnnnnnnnnnnnnnnnnnnnnnnnnnnnnnnnnnnnnnnnnnnnnnnnnnnnnnnnnnnnnnnnnnnnnnnnnnnnnnnnnnnnnnnnnnnnnnnnnnnnnnnnnnnnnnnnnnnnnnnnnnnnnnnnnnnnnnnnnnnnnnnnnnnnnnnnnnnnnnnnnnnnnnnnnnnnnnnnnnnnnnnnnnnnnnnnnnnnnnnnnnnnnnnnnnnnnnnnnnnnnnnnnnnnnnnnnnnnnnnnnnnnnnnnnnnnnnnnnnnnnnnnnnnnnnnnnnnnnnnnnnnnnnnnnnnnnnnnnnnnnnnnnnnnnnnnnnnnnnnnnnnnnnnnnnnnnnnnnnnnnnnnnnnnnnnnnnnnnnnnnnnnnnnnnnnnnnnnnnnnnnnnnnnnnnnnnnnnnnnnnnnnnnnnnnnnnnnnnnnnnnnnnnnnnnnnnnnnnnnnnnnnnnnnnnnnnnnnnnnnnnnnnnnnnnnnnnnnnnnnnnnnnnnnnnnnnnnnnnnnnnnnnnnnnnnnnnnnnnnnnnnnnnnnnnnnnnnnnnnnnnnnnnnnnnnnnnnnnnnnnnnnnnnnnnnnnnnnnnnnnnnnnnnnnnnnnnnnnnnnnnnnnnnnnnnnnnnnnnnnnnnnnnnnnnnnnnnnnnnnnnnnnnnnnnnnnnnnnnnnnnnnnnnnnnnnnnnnnnnnnnnnnnnnnnnnnnnnnnnnnnnnnnnnnnnnnnnnnnnnnnnnnnnnnnnnnnnnnnnnnnnnnnnnnnnnnnnnnnnnnnnnnnnnnnnnnnnnnnnnnnnnnnnnnnnnnnnnnnnnnnnnnnnnnnnnnnnnnnnnnnnnnnnnnnnnnnnnnnnnnnnnnnnnnnnnnnnnnnnnnnnnnnnnnnnnnnnnnnnnnnnnnnnnnnnnnnnnnnnnnnnnnnnnnnnnnnnnnnnnnnnnnnnnnnnnnnnnnnnnnnnnnnnnnnnnnnnnnnnnnnnnnnnnnnnnnnnnnnnnnnnnnnnnnnnnnnnnnnnnnnnnnnnnnnnnnnnnnnnnnnnnnnnnnnnnnnnnnnnnnnnnnnnnnnnnnnnnnnnnnnnnnnnnnnnnnnnnnnnnnnnnnnnnnnnnnnnnnnnnnnnnnnnnnnnnnnnnnnnnnnnnnnnnnnnnnnnnnnnnnnnnnnnnnnnnnnnnnnnnnnnnnnnnnnnnnnnnnnnnnnnnnnnnnnnnnnnnnnnnnnnnnnnnnnnnnnnnnnnnnnnnnnnnnnnnnnnnnnnnnnnnnnnnnnnnnnnnnnnnnnnnnnnnnnnnnnnnnnnnnnnnnnnnnnnnnnnnnnnnnnnnnnnnnnnnnnnnnnnnnnnnnnnnnnnnnnnnnnnnnnnnnnnnnnnnnnnnnnnnnnnnnnnnnnnnnnnnnnnnnnnnnnnnnnnnnnnnnnnnnnnnnnnnnnnnnnnnnnnnnnnnnnnnnnnnnnnnnnnnnnnnnnnnnnnnnnnnnnnnnnnnnnnnnnnnnnnnnnnnnnnnnnnnnnnnnnnnnnnnnnnnnnnnnnnnnnnnnnnnnnnnnnnnnnnnnnnnnnnnnnnnnnnnnnnnnnnnnnnnnnnnnnnnnnnnnnnnnnnnnnnnnnnnnnnnnnnnnnnnnnnnnnnnnnnnnnnnnnnnnnnnnnnnnnnnnnnnnnnnnnnnnnnnnnnnnnnnnnnnnnnnnnnnnnnnnnnnnnnnnnnnnnnnnnnnnnnnnnnnnnnnnnnnnnnnnnnnnnnnnnnnnnnnnnnnnnnnnnnnnnnnnnnnnnnnnnnnnnnnnnnnnnnnnnnnnnnnnnnnnnnnnnnnnnnnnnnnnnnnnnnnnnnnnnnnnnnnnnnnnnnnnnnnnnnnnnnnnnnnnnnnnnnnnnnnnnnnnnnnnnnnnnnnnnnnnnnnnnnnnnnnnnnnnnnnnnnnnnnnnnnnnnnnnnnnnnnnnnnnnnnnnnnnnnnnnnnnnnnnnnnnnnnnnnnnnnnnnnnnnnnnnnnnnnnnnnnnnnnnnnnnnnnnnnnnnnnnnnnnnnnnnnnnnnnnnnnnnnnnnnnnnnnnnnnnnnnnnnnnnnnnnnnnnnnnnnnnnnnnnnnnnnnnnnnnnnnnnnnnnnnnnnnnnnnnnnnnnnnnnnnnnnnnnnnnnnnnnnnnnnnnnnnnnnnnnnnnnnnnnnnnnnnnnnnnnnnnnnnnnnnnnnnnnnnnnnnnnnnnnnnnnnnnnnnnnnnnnnnnnnnnnnnnnnnnnnnnnnnnnnnnnnnnnnnnnnnnnnnnnnnnnnnnnnnnnnnnnnnnnnnnnnnnnnnnnnnnnnnnnnnnnnnnnnnnnnnnnnnnnnnnnnnnnnnnnnnnnnnnnnnnnnnnnnnnnnnnnnnnnnnnnnnnnnnnnnnnnnacgcataaacatcttccacatgcccttcacgtatgcggttttgtagtgcgcgccagtaatcagcgcggaacaagtcggcgtgcatctcttcaaatagcggaccaatacgcgggtcggcacataaccagtgacggaactcttccgggaaaacatcgcccggcgagacgctgtaccacggttcgctggcaagttcgtcttccgggtagcgcggcagcgggatgtcgcggaaattcacttccgtcatgtagcaaatttcgtcgtaatcataaaacaccacgcgcccgtgacgggtgacgccaaagtttttaaataacatatccccagggaagatgttggcagcggcaagctggcgaatggcgttgccgtactcttcaatggcatcacgcaattgctgcccctcaacttgctcaagccagatattaagcggcaccatccgtcgttcgatatagagatggcgaatcacaatttgttcgccgagatcggtgattttttccgctgcttcctggagcagtaattccattaatgccggggaaatatgccgcttctccagcacaaagttttcaaactcctgggtgtccgccattcggcccacgcgatcatgctctttcaccagttggtagcaggcacgaacgtgagcggcagacatctctttctgcggcgcgaacctgtctttgatgactttgaatactcgatcaaaacccggcaacgtaaacaccaacatcaccattccacgaatacccggcgcttcaatgaactgctcattacagccctgtagataaacgagatattcgcggtagctttcggttttggcgtgcttctggcagccgatagccatatacaattcagcggtggttttacctggcagaatttcccgtagccactcgaccagcgctgcgggcagcggtgcataaaccataaaataagaacgcgcaaagccaaaaacaatgctcgcttcggcggtcgtcgtcaggcaggtatcaataaataactcgccgtcgtccgtctggtggatcggcaataaaaatggcaacgtgccggaaggcgtgatcagtttgcccaccagccaggctgccttattgcggtaaaacagttcgttcgccacctgtaaatgactttccgcgaggttgtctgtccccagcgtttccgtcagatggcgaacgatgtaatgaatgtcacggcttttattctgccaacgcagacgcagcggcagatcgctgataacgcgcatcagcagagattcccagccgtgatcggggtgaaagtctttcgccagtgggcgtggaatggtacgaaagcggcgctctggctgggagctaaagataaaaagccgctcgggagtaagcgagcggtggtcaaataaccgacagtacacggagttgaaaaagctctccgcaatctcgaagcgcgggtaatctggcaacagccgggtgtaatgctctttaacgcgcagtaaaaatgccgcgtccgtgctttggccattagtaatgcagcgcagttgctccacgaccagacccacgtgatgatcgtaaagatgaatacggtttttcatcgcctgctggacagcatgccagtcggcttgctcgaaacgctgctgcgccccggaagtcacttcgaggaatcgaccatactgagcgtcgaaaccttgcaaaatggtttgtgcaatcagtaattccaggccacgcggcatttgttgccctcgtcgggagcagagaattgccggataagacgcgtaagcgtcacatcaggcgctgattgccggatgcggcgtgaacgccttatccggcctacgttcggcaacggctgtaggcatgataagacgcgcaagcgtcgcatcaggcgctgattgccggatgcggcgtgaacgccttatccggcctacagtcagcaacgtttatcggttgcttagaactgcgattcttcggtggagccggtcagcgcggtaactgaagacgtgccaccttgaataatggtcgtcactttatcgaagtaacctgtacccacttcctgttggtgagatacgaaggtatagccatctttcgcggcggcaaattccggctgctgcactttctcaacatagtgcttcataccctcgccctgggcataggcgtttgccaggtcaaacatgttgaaccacatgctgtggatacctgccagggtgatgaactggaacttgtagcccatatccgacagctgctgctggaagctggcaatagttttgtcgtcgaggtttttctgccagttgaacgacggcgagcagttataagccagcagtttgcccggatatttcgcgtggatggcttgtgcaaagcgacgcgccagttctaggtccggcgtggaggtttcacaccataccaggtcagcatatggcgcatacgccaggccacggctgatcgcttgctcaatacccgcatgagtacggaagaagccttcactggtacgctcgccagtaataaattcgctgtcatatgggtcgcaatcggaggtaatcagatccgccgcatcggcatcggtacgagcaaccagcagggttggaacgcccgtcacatcagctgccagacgcgccgcgaccagtttctgaatagcttcctgagttggcaccaaaactttgccgcccatgtgaccacatttcttcactgatgccagctgatcttcgaagtgaactgccgctgcaccggcttcaatcatcgctttcatcagttcaaaggcattcagtacaccgccaaaaccggcctccgcatcggcgacgatcggcaggaagtaatcgacatagcgcggatcgcccggctcaatgcccgcggaccattggatctgatccgcacggcggaaagtattgttgatccgctccaccaccgctggcaccgagtttgccggatagagcgactgatccggatacatgctggccgccaggttagcgtccgccgctacctgccatcccgacagatagactgcttcaatacccgctttcgcctgttgcagcgcctgaccgccagtcagtgcaccgaggctgttgatgtagccttttttcgactcgccgtgcagcagacgccacattttcgccgcacccagttgcgccagggtgcattccggattgactgaaccgcgtaatttcaccacatcttccgcgctgtacgggcgagtaatgccttcccaacgcggttgagtccactctttctgtaattcttcaatttgttgtgtacgggttttcatgtgcagatgctccatagttatgtggtggtttacgctaacaggcggtagcctggcagggtcaggaaatcaattaactcatcggaagtggtgatctgttccatcaagcgtgcggcatcgtcaaaacgcccatgggagaaacgttcttcgcccagttcgctggcaatgactttcatctcttcgcccagcatctggcggaacaaggctttagtcaccggtttgccattgctcaacgttttttgatgatggatccactgccagattgaggtacgggaaatttcagccgtcgccgcatcttccatcaggccataaatcggcacacagccattgccagagatccacgcttcgatgtactgcacagccacgcgaatgttggcgcgcataccttcttcggtgcgttcaccagcacaaggtgccagcagctgatcggcagtaatcggcgcgtcttgttcgcgcatcacctcaagctggtttttgcgggagccgagaatatcgttgaataccgccattgccgtatcagcaaggcccgggtgagcgatccatgtgccatcgtgaccgttattggcttccagcgatttatccgcttttactttgtcgagcacctggttattgcgctcttcatctttgctcggaataaacgccgccatgccgcccatcgcaaaagcaccgcgtttatggcaggttttaatcaacaggcgtgagtaagcattcaggaagggtttatccatcgtcactgcctgtctgtctggcaggacgcgatcgggatagtttttcaatgttttgatataactgaagatgtaatcccaacgaccgcagttcagaccaacaatatggtcacgcagcgcgtgaaggatttcatccatctggaacacggcgggcagcgtttcaatcagcaacgtcgccttgatggtgccgcgcggcagattaaagcgatcttctgcatagctgaagacttcgctccaccaggccgcttcctgccaggactgggttttcggcagatagaaatagggaccgctgccctttgccaacagtgcctgatagttgtggaagaaatagagcgcaaaatcaaacaggctaccggggattgtctcaccacgccaggtgacatgtttttccggcaagtgcagaccgcgtacccgacaaatcaaaaccgctggattgggcttgagctgataaattttgcctgcttcattgctatagctgatggtgccgttaaccgcatcgcgcaggttaatttgcccatcgatcactttgttccagtctggtgccagtgaatcttcgaaatcggccataaagactttcacattggcgttgagcgcgttgatcaccatcttgcgctctacaggtccggtaatctctacgcgacgatcttctaagtccgaaggaatcccgcgaattttccagtcagcataacgaatggaagctgtttccgaaataaaatcaggcaacattccgttatcgatatcctgctgctgctgaatacgcgctgccagaagtttattgcgttgtggcgtaaaatgcgtcaccagctcagtcagaaattctaccgcttcggcagtaagaatttgcttctcctgctcgccatacggccttgtaaaagccagttcatcgattgttgttgcctgttcagtcatcgtgcagctcctcgtcatggatccgaaaacttccccactgtgaacgaaggatcgttgtgcgcttttcgttcagcacaactaagactactcatttaaaatgcaaaatcaaaaacaatttccattttaattaaaaatacatgttaacttattgataacaatataaataaaatttattcacttactgaggtgtgtttcggaaataaaaaaggcacccgaaggtgcctgaggtaaggtgctgaatcgcttaacgatcgactatcacagaagattaatccagcgttggattcatgtgccgtagatcatatggcgtgatctggtagacgtaatagttgagccagttggtaaacagcaaattaccgtgactacgccagctcgctcgcggtgtattttgcggatcattgtgcgggaaatagttatacggtacatccgggtctagcccggcttccacatcgcggaaatattcctgcgccagcgtttgcgcatcatattcgggatggcccgtcacaaaggcaatgcgcttatctttgctggcaaacagatatgcatccccttcttccgtctctgccagaatttccagatcggtataatcacgaatcaacgctgccggaaagtcagcatagcgcgaatgcggtgccaggaatgaatcatcaaagccacgcgtcagaagcgcatgaggatggagaatatgatgctcgtaaacgccagagagtttgtcggtgcgggtttgcttaggaataccatagaggatattgagcgcggcctgtacagcccagcagacaaacagcgtcgaggtgacgtgatctttcgaccactccagcacctgtttgatctgcggccagtaagcgacatcattaaactccaccaggcccagtggcgcgccggtaactatcagaccgtcaaagttttgttcctgaatatcttcaaagttacagtagaagttattcagatgctctgcgggcgtgttgcgcgattcacgggaatcgatgcgcaaaagctgaatatcgacctgcaaaggtgagtttgaaagcaggcgcagaaactgattttcagtttcgatcttcttcggcatcaggttaaggataagcacctttagcggacgaatttcctgaccagacgcgcgagaagttgtcatcacaaagacgttttcttcacgcaagaaattgacggcgggtagctcgtccggcacacgaatcggcataacctgattacctcactatatacgcttatacgtttagacatccagatagctgaagataaccagaaaatttaccaatgtcgagcctgcatgttgaaggtgagaaagtttcaaggaaaaggctacgttagaatataagaatgacgaaaaggagagaaaatggttattagtattcgccgctcacggcatgaggagggggaggaactcgttgcgatttggtgtcgttctgtcgatgccactcacgattttttatcagcagagtatcgggccgagctggaagagctggtgcattcctttctgccggaagcaccgttgtgggtcgcggttaatgagcgggatcagccggttgggtttatgttgttaagtgggcagcatatggatgcgctgtttatcgatcctgatgtgcgcggctgcggcgtgggccggatgctggtgaagcatgcgctctcaatggccccggaactgacaaccaatgttaatgagcaaaatgagcaggcggttgggttctataagaaggtgggctttaaggttacggaacgctctgaggtggacgatttggggaaaccgtatccgttgctgaatctggcatatgtgggggtgtaggcggtttttttctcatcccggtgggctgaactttaggtttcgtacccaccaatggtgacatgattatttctgcttaaacattgccaggaccgcactatcactgagtaccactgattgcgcatggatgtggaactggcgatatttcattaacgttgcccctgcgaccacttcatgaagaatgcgttcctcaacctgtgacaaaccgccctcattcatttccagcgcgctcacaacaatatccatacgttttgctggcaaaaaagaatgccaggttgaacgtgggtggagttgcagaacaagatcttgcagaactttttctgcaacaaagaaattggcgattaacaggcgctggttactgaaggcagcatctcctgacacttcacgtttgctttcaagatcgcgaacagtaatttgattacgacgaatttggatatacagaactgacatgagattcccttcatcatgcaaataattgatatgcaaaaaaccccggccttattgaccggggtttttctaatttgatgnctggcagttccctactctcgcatggggagaccccacactaccatcggcgctacggcgtttcacttctgagttcggcatggggtcaggtgggaccaccgcgctaaggccgccaggcaaattctgttncattaacccgcttgtcgccggttaatctaatctgtatcaggctgaaaatcttctctcatccgccaaaacatcttcggcgttgtaaggttaagcctcacggttcattagtaccggttagctcaacgcatcgctgcgcttacacacccggcctatcaacgtcgtcgtcttcaacgttccttcaggacnctcaaggagtcagggagaactcatctcggggcaagtttcgtgcttagatgctttcagcacttatctcttccgcatttagctaccgggcagtgccattggcatgacaacccgaacaccagtgatgcgtccactccggtcctctcgtactaggagcagcccccctcagttctccagcgcccacggcagatagggaccgaactgtctcacgacgttctaaacccagctcgcgtaccactttaaatggcgaacagccatacccttgggacctacttcagccccaggatgtgatgagccgacatcgaggtgccaaacaccgccgtcgatatgaactcttgggcggtatcagcctgttatccccggagtaccttttatccgttgagcgatggcccttccattcagaaccaccggatcactatgacctgctttcgcacctgctcgcgccgtcacgctcgcagtcaagctggcttatgccattgcactaacctcctgatgtccgaccaggattagccaaccttcgtgctcctccgttactctttaggaggagaccgccccagtcaaactacccaccagacactgtccgcaacccggattacgggccaacgttagaacatcaaacattaaagggtggtatttcaaggtcggctccatgcagactggcgtccacacttcaaagcctcccacctatcctacacatcaaggctcaatgttcagtgtcaagctatagtaaaggttcacggggtctttccgtcttgccgcgggtacactgcatcttcacagcgagttcaatttcactgagtctcgggtggagacagcctggccatcattacgccattcgtgcaggtcggaacttacccgacaaggaatttcgctaccttaggaccgttatagttacggccgccgtttaccggggcttcgatcaagagcttcgcgttaccgctaaccccatcaattaaccttccggcaccgggcaggcgtcacaccgtatacgtccactttcgtgtttgcacagtgctgtgtttttaataaacagttgcagccagctggtatcttcgactgatttcagctccacgagcaagtcgcttcacctacatatcagcgtgccttctcccgaagttacggcaccattttgcctagttccttcacccgagttctctcaagcgccttggtattctctacctgaccacctgtgtcggtttggggtacgatttgatgttacctgatgcttagaggcttttcctggaagcagggcatttgtcncttcagcaccgtagtgcctcgtcatcacgcctcagccttggttttccggatttgcctggaaaaccagcctacacgcttaaaccgggacaaccgtcgcccggccaacatagccttctccgtccccccttcgcagtaacaccaagtacaggaatattaacctgtttcccatcgactacgcctttcggcctcgccttaggggtcgactcaccctgcccngattaacgttggacaggaacccttggtcttccggcgagcgggcttttcacccgctttatcgttacttatgtcagcattcgcacttctgatacctccagcaaccctcacaggccaccttcacaggcttacagaacgctcccctacccaacaacacatagtgtcgctgccgcagcttcggtgcatggtttagccccgttacatcttccgcgcaggccgactcgaccagtgagctattacgctttctttaaatgatggctgcttctaagccaacatcctggctgtctgggccttcccacatcgtttcccacttaaccatgactttgggaccttagctggcggtctgggttgtttccctcttcacgacggacgttagcacccgccgtgtgtctcccgtgataacattctccggtattcgcagtttgcatcgggttggtaagtcgggatgacccccttgccgaaacagtgctctacccccggagatgaattcacgaggcgctacctaaatagctttcggggagaaccagctatctcccggtttgattggcctttcacccccagccacaagtcatccgctaatttttcaacattagtcggttcggtcctccagttagtgttacccaaccttcaacctgcccatggctagatcaccgggtttcgggtctataccctgcaacttaacgcccagttaagactcggtttcccttcggctcccctattcggttaaccttgctacagaatataagtcgctgacccattatacaaaaggtacgcagtcaccccattaagaggctcccactgcttgtacgtacacggtttcaggttctttttcactcccctcgccggggttcttttcgcctttnnnnnnnnnnnnnnnnnnnnnnnnnnnnnnnnnnnnnnnnnnnnnnnnnnnnnnnnnnnnnnnnnnnnnnnnnnnnnnnnnnnnnnnnnnnnnnnnnnnnnnnnnnnnnnnnnnnnnnnnnnnnnnnnnnnnnnnnnnnnnnnnnnnnnnnnnnnnnnnnnnnnnnnnnnnnnnnnnnnnnnnnnnnnnnnnnnnnnnnnnnnnnnnnnnnnnnnnnnnnnnnnnnnnnnnnnnnnnnnnnnnnnnnnnnnnnnnnnnnnnnnnnnnnnnnnnnnnnnnnnnnnnnnnnnnnnnnnnnnnnnnnnnnnnnnnnnnnnnnnnnnnnnnnnnnnnnnnnnnnnnnnnnnnnnnnnnnnnnnnnnnnnnnnnnnnnnnnnnnnnnnnnnnnnnnnnnnnnnnnnnnnnnnnnnnnnnnnnnnnnnnnnnnnnnnnnnnnnnnnnnnnnnnnnnnnnnnnnnnnnnnnnnnnnnnnnnnnnnnnnnnnnnnnnnnnnnnnnnnnnnnnnnnnnnnnnnnnnnnnnnnnnnnnnnnnnnnnnnnnnnnnnnnnnnnnnnnnnnnnnnnnnnnnnnnnnnnnnnnnnnnnnnnnnnnnnnnnnnnnnnnnnnnnnnnnnnnnnnnnnnnnnnnnnnnnnnnnnnnnnnnnnnnnnnnnnnnnnnnnnnnnnnnnnnnnnnnnnnnnnnnnnnnnnnnnnnnnnnnnnnnnnnnnnnnnnnnnnnnnnnnnnnnnnnnnnnnnnnnnnnnnnnnnnnnnnnnnnnnnnnnnnnnnnnnnnnnnnnnnnnnnnnnnnnnnnnnnnnnnnnnnnnnnnnnnnnnnnnnnnnnnnnnnnnnnnnnnnnnnnnnnnnnnnnnnnnnnnnnnnnnnnnnnnnnnnnnnnnnnnnnnnnnnnnnnnnnnnnnnnnnnnnnnnnnnnnnnnnnnnnnnnnnnnnnnnnnnnnnnnnnnnnnnnnnnnnnnnnnnnnnnnnnnnnnnnnnnnnnnnnnnnnnnnnnnnnnnnnnnnnnnnnnnnnnnnnnnnnnnnnnnnnnnnnnnnnnnnnnnnnnnnnnnnnnnnnnnnnnnnnnnnnnnnnnnnnnnnnnnnnnnnnnnnnnnnnnnnnnnnnnnnnnnnnnnnnnnnnnnnnnnnnnnnnnnnnnnnnnnnnnnnnnnnnnnnnnnnnnnnnnnnnnnnnnnnnnnnnnnnnnnnnnnnnnnnnnnnnnnnnnnnnnnnnnnnnnnnnnnnnnnnnnnnnnnnnnnnnnnnnnnnnnnnnnnnnnnnnnnnnnnnnnnnnnnnnnnnnnnnnnnnnnnnnnnnnnnnnnnnnnnnnnnnnnnnnnnnnnnnnnnnnnnnnnnnnnnnnnnnnnnnnnnnnnnnnnnnnnnnnnnnnnnnnnnnnnnnnnnnnnnnnnnnnnnnnnnnnnnnnnnnnnnnnnnnnnnnnnnnnnnnnnnnnnnnnnnnnnnnnnnnnnnnnnnnnnnnnnnnnnnnnnnnnnnnnnnnnnnnnnnnnnnnnnnnnnnnnnnnnnnnnnnnnnnnnnnnnnnnnnnnnnnnnnnnnnnnnnnnnnnnnnnnnnnnnnnnnnnnnnnnnnnnnnnnnnnnnnnnnnnnnnnnnnnnnnnnnnnnnnnnnnnnnnnnnnnnnnnnnnnnnnnnnnnnnnnnnnnnnnnnnnnnnnnnnnnnnnnnnnnnnnnnnnnnnnnnnnnnnnnnnnnnnnnnnnnnnnnnnnnnnnnnnnnnnnnnnnnnnnnnnnnnnnnnnnnnnnnnnnnnnnnnnnnnnnnnnnnnnnnnnnnnnnnnnnnnnnnnnnnnnnnnnnnnnnnnnnnnnnnnnnnnnnnnnnnnnnnnnnnnnnnnnnnnnnnnnnnnnnnnnnnnnnnnnnnnnnnnnnnnnnnnnnnnnnnnnnnnnnnnnnnnnnnnnnnnnnnnnnnnnnnnnnnnnnnnnnnnnnnnnnnnnnnnnnnnnnnnnnnnnnnnnnnnnnnnnnnnnnnnnnnnnnnnnnnnnnnnnnnnnnnnnnnnnnnnnnnnnnnnnnnnnnnnnnnnnnnnnnnnnnnnnnnnnnnnnnnnnnnnnnnnnnnnnnnnnnnnnnnnnnnnnnnnnnnnnnnnnnnnnnnnnnnnnnnnnnnnnnnnnnnnnnnnnnnnnnnnnnnnnnnnnnnnnnnnnnnnnnnnnnnnnnnnnnnnnnnnnnnnnnnnnnnnnnnnnnnnnnnnnnnnnnnnnnnnnnnnnnnnnnnnnnnnnnnnnnnnnnnnnnnnnnnnnnnnnnnnnnnnnnnnnnnnnnnnnnnnnnnnnnnnnnnnnnnnnnnnnnnnnnnnnnnnnnnnnnnnnnnnnnnnnnnnnnnnnnnnnnnnnnnnnnnnnnnnnnnnnnnnnnnnnnnnnnnnnnnnnnnnnnnnnnnnnnnnnnnnnnnnnnnnnnnnnnnnnnnnnnnnnnnnnnnnnnnnnnnnnnnnnnnnnnnnnnnnnnnnnnnnnnnnnnnnnnnnnnnnnnnnnnnnnnnnnnnnnnnnnnnnnnnnnnnnnnnnnnnnnnnnnnnnnnnnnnnnnnnnnnnnnnnnnnnnnnnnnnnnnnnnnnnnnnnnnnnnnnnnnnnnnnnnnnnnnnnnnnnnnnnnnnnnnnnnnnnnnnnnnnnnnnnnnnnnnnnnnnnnnnnnnnnnnnnnnnnnnnnnnnnnnnnnnnnnnnnnnnnnnnnnnnnnnnnnnnnnnnnnnnnnnnnnnnnnnnnnnnnnnnnnnnnnnnnnnnnnnnnnnnnnnnnnnnnnnnnnnnnnnnnnnnnnnnnnnnnnnnnnnnnnnnnnnnnnnnnnnnnnnnnnnnnnnnnnnnnnnnnnnnnnnnnnnnnnnnnnnnnnnnnnnnnnnnnnnnnnnnnnnnnnnnnnnnnnnnnnnnnnnnnnnnnnnnnnnnnnnnnnnnnnnnnnnnnnnnnnnnnnnnnnnnnnnnnnnnnnnnnnnnnnnnnnnnnnnnnnnnnnnnnnnnnnnnnnnnnnnnnnnnnnnnnnnnnnnnnnnnnnnnnnnnnnnnnnnnnnnnnnnnnnnnnnnnnnnnnnnnnnnnnnnnnnnnnnnnnnnnnnnnnnnnnnnnnnnnnnnnnnnnnnnnnnnnnnnnnnnnnnnnnnnnnnnnnnnnnnnnnnnnnnnnnnnnnnnnnnnnnnnnnnnnnnnnnnnnnnnnnnnnnnnnnnnnnnnnnnnnnnnnnnnnnnnnnnnnnnnnnnnnnnnnnnnnnnnnnnnnnnnnnnnnnnnnnnnnnnnnnnnnnnnnnnnnnnnnnnnnnnnnnnnnnnnnnnnnnnnnnnnnnnnnnnnnnnnnnnnnnnnnnnnnnnnnnnnnnnnnnnnnnnnnnnnnnnnnnnnnnnnnnnnnnnnnnnnnnnnnnnnnnnnnnnnnnnnnnnnnnnnnnnnnnnnnnnnnnnnnnnnnnnnnnnnnnnnnnnnnnnnnnnnnnnnnnnnnnnnnnnnnnnnnnnnnnnnnnnnnnnnnnnnnnnnnnnnnnnnnnnnnnnnnnnnnnnnnnnnnnnnnnnnnnnnnnnnnnnnnnnnnnnnnnnnnnnnnnnnnnnnnnnnnnnnnnnnnnnnnnnnnnnnnnnnnnnnnnnnnnnnnnnnnnnnnnnnnnnnnnnnnnnnnnnnnnnnnnnnnnnnnnnnnnnnnnnnnnnnnnnnnnnnnnnnnnnnnnnnnnnnnnnnnnnnnnnnnnnnnnnnnnnnnnnnnnnnnnnnnnnnnnnnnnnnnnnnnnnnnnnnnnnnnnnnnnnnnnnnnnnnnnnnnnnnnnnnnnnnnnnnnnnnnnnnnnnnnnnnnnnnnnnnnnnnnnnnnnnnnnnnnnnnnnnnnnnnnnnnnnnnnnnnnnnnnnnnnnnnnnnnnnnnnnnnnnnnnnnnnnnnnnnnnnnnnnnnnnnnnnnnnnnnnnnnnnnnnnnnnnnnnnnnnnnnnnnnnnnnnnnnnnnnnnnnnnnnnnnnnnnnnnnnnnnnnnnnnnnnnnnnnnnnnnnnnnnnnnnnnnnnnnnnnnnnnnnnnnnnnnnnnnnnnnnnnnnnnnnnnnnnnnnnnnnnnnnnnnnnnnnnnnnnnnnnnnnnnnnnnnnnnnnnnnnnnnnnnnnnnnnnnnnnnnnnnnnnnnnnnnnnnnnnnnnnnnnnnnnnnnnnnnnnnnnnnnnnnnnnnnnnnnnnnnnnnnnnnnnnnnnnnnnnnnnnnnnnnnnnnnnnnnnnnnnnnnnnnnnnnnnnnnnnnnnnnnnnnnnnnnnnnnnnnnnnnnnnnnnnnnnnnnnnnnnnnnnnnnnnnnnnnnnnnnnnnnnnnnnnnnnnnnnnnnnnnnnnnnnnnnnnnnnnnnnnnnnnnnnnnnnnnnnnnnnnnnnnnnnnnnnnnnnnnnnnnnnnnnnnnnnnnnnnnnnnnnnnnnnnnnnnnnnnnnnnnnnnnnnnnnnnnnnnnnnnnnnnnnnnnnnnnnnnnnnnnnnnnnnnnnnnnnnnnnnnnnnnnnnnnnnnnnnnnnnnnnnnnnnnnnnnnnnnnnnnnnnnnnnnnnnnnnnnnnnnnnnnnnnnnnnnnnnnnnnnnnnnnnnnnnnnnnnnnnnnnnnnnnnnnnnnnnnnnnnnnnnnnnnnnnnnnnnnnnnnnnnnnnnnnnnnnnnnnnnnnnnnnnnnnnnnnnnnnnnnnnnnnnnnnnnnnnnnnnnnnnnnnnnnnnnnnnnnnnnnnnnnnnnnnnnnnnnnnnnnnnnnnnnnnnnnnnnnnnnnnnnnnnnnnnnnnnnnnnnnnnnnnnnnnnnnnnnnnnnnnnnnnnnnnnnnnnnnnnnnnnnnnnnnnnnnnnnnnnnnnnnnnnnnnnnnnnnnnnnnnnnnnnnnnnnnnnnnnnnnnnnnnnnnnnnnnnnnnnnnnnnnnnnnnnnnnnnnnnnnnnnnnnnnnnnnnnnnnnnnnnnnnnnnnnnnnnnnnnnnnnnnnnnnnnnnnnnnnnnnnnnnnnnnnnnnnnnnnnnnnnnnnnnnnnnnnnnnnnnnnnnnnnnnnnnnnnnnnnnnnnnnnnnnnnnnnnnnnnnnnnnnnnnnnnnnnnnnnnnnnnnnnnnnnnnnnnnnnnnnnnnnnnnnnnnnnnnnnnnnnnnnnnnnnnnnnnnnnnnnnnnnnnnnnnnnnnnnnnnnnnnnnnnnnnnnnnnnnnnnnnnnnnnnnnnnnnnnnnnnnnnnnnnnnnnnnnnnnnnnnnnnnnnnnnnnnnnnnnnnnnnnnnnnnnnnnnnnnnnnnnnnnnnnnnnnnnnnnnnnnnnnnnnnnnnnnnnnnnnnnnnnnnnnnnnnnnnnnnnnnnnnnnnnnnnnnnnnnnnnnnnnnnnnnnnnnnnnnnnnnnnnnnnnnnnnnnnnnnnnnnnnnnnnnnnnnnnnnnnnnnnnnnnnnnnnnnnnnnnnnnnnnnnnnnnnnnnnnnnnnnnnnnnnnnnnnnnnnnnnnnnnnnnnnnnnnnnnnnnnnnnnnnnnnnnnnnnnnnnnnnnnnnnnnnnnnnnnnnnnnnnnnnnnnnnnnnnnnnnnnnnnnnnnnnnnnnnnnnnnnnnnnnnnnnnnnnnnnnnnnnnnnnnnnnnnnnnnnnnnnnnnnnnnnnnnnnnnnnnnnnnnnnnnnnnnnnnnnnnnnnnnnnnnnnnnnnnnnnnnnnnnnnnnnnnnnnnnnnnnnnnnnnnnnnnnnnnnnnnnnnnnnnnnnnnnnnnnnnnnnnnnnnnnnnnnnnnnnnnnnnnnnnnnnnnnnnnnnnnnnnnnnnnnnnnnnnnnnnnnnnnnnnnnnnnnnnnnnnnnnnnnnnnnnnnnnnnnnnnnnnnnnnnnnnnnnnnnnnnnnnnnnnnnnnnnnnnnnnnnnnnnnnnnnnnnnnnnnnnnnnnnnnnnnnnnnnnnnnnnnnnnnnnnnnnnnnnnnnnnnnnnnnnnnnnnnnnnnnnnnnnnnnnnnnnnnnnnnnnnnnnnnnnnnnnnnnnnnnnnnnnnnnnnnnnnnnnnnnnnnnnnnnnnnnnnnnnnnnnnnnnnnnnnnnnnnnnnnnnnnnnnnnnnnnnnnnnnnnnnnnnnnnnnnnnnnnnnnnnnnnnnnnnnnnnnnnnnnnnnnnnnnnnnnnnnnnnnnnnnnnnnnnnnnnnnnnnnnnnnnnnnnnnnnnnnnnnnnnnnnnnnnnnnnnnnnnnnnnnnnnnnnnnnnnnnnnnnnnnnnnnnnnnnnnnnnnnnnnnnnnnnnnnnnnnnnnnnnnnnnnnnnnnnnnnnnnnnnnnnnnnnnnnnnnnnnnnnnnnnnnnnnnnnnnnnnnnnnnnnnnnnnnnnnnnnnnnnnnnnnnnnnnnnnnnnnnnnnnnnnnnnnnnnnnnnnnnnnnnnnnnnnnnnnnnnnnnnnnnnnnnnnnnnnnnnnnnnnnnnnnnnnnnnnnnnnnnnnnnnnnnnnnnnnnnnnnnnnnnnnnnnnnnnnnnnnnnnnnnnnnnnnnnnnnnnnnnnnnnnnnnnnnnnnnnnnnnnnnnnnnnnnnnnnnnnnnnnnnnnnnnnnnnnnnnnnnnnnnnnnnnnnnnnnnnnnnnnnnnnnnnnnnnnnnnnnnnnnnnnnnnnnnnnnnnnnnnnnnnnnnnnnnnnnnnnnnnnnnnnnnnnnnnnnnnnnnnnnnnnnnnnnnnnnnnnnnnnnnnnnnnnnnnnnnnnnnnnnnnnnnnnnnnnnnnnnnnnnnnnnnnnnnnnnnnnnnnnnnnnnnnnnnnnnnnnnnnnnnnnnnnnnnnnnnnnnnnnnnnnnnnnnnnnnnnnnnnnnnnnnnnnnnnnnnnnnnnnnnnnnnnnnnnnnnnnnnnnnnnnnnnnnnnnnnnnnnnnnnnnnnnnnnnnnnnnnnnnnnnnnnnnnnnnnnnnnnnnnnnnnnnnnnnnnnnnnnnnnnnnnnnnnnnnnnnnnnnnnnnnnnnnnnnnnnnnnnnnnnnnnnnnnnnnnnnnnnnnnnnnnnnnnnnnnnnnnnnnnnnnnnnnnnnnnnnnnnnnnnnnnnnnnnnnnnnnnnnnnnnnnnnnnnnnnnnnnnnnnnnnnnnnnnnnnnnnnnnnnnnnnnnnnnnnnnnnnnnnnnnnnnnnnnnnnnnnnnnnnnnnnnnnnnnnnnnnnnnnnnnnnnnnnnnnnnnnnnnnnnnnnnnnnnnnnnnnnnnnnnnnnnnnnnnnnnnnnnnnnnnnnnnnnnnnnnnnnnnnnnnnnnnnnnnnnnnnnnnnnnnnnnnnnnnnnnnnnnnnnnnnnnnnnnnnnnnnnnnnnnnnnnnnnnnnnnnnnnnnnnnnnnnnnnnnnnnnnnnnnnnnnnnnnnnnnnnnnnnnnnnnnnnnnnnnnnnnnnnnnnnnnnnnnnnnnnnnnnnnnnnnnnnnnnnnnnnnnnnnnnnnnnnnnnnnnnnnnnnnnnnnnnnnnnnnnnnnnnnnnnnnnnnnnnnnnnnnnnnnnnnnnnnnnnnnnnnnnnnnnnnnnnnnnnnnnnnnnnnnnnnnnnnnnnnnnnnnnnnnnnnnnnnnnnnnnnnnnnnnnnnnnnnnnnnnnnnnnnnnnnnnnnnnnnnnnnnnnnnnnnnnnnnnnnnnnnnnnnnnnnnnnnnnnnnnnnnnnnnnnnnnnnnnnnnnnnnnnnnnnnnnnnnnnnnnnnnnnnnnnnnnnnnnnnnnnnnnnnnnnnnnnnnnnnnnnnnnnnnnnnnnnnnnnnnnnnnnnnnnnnnnnnnnnnnnnnnnnnnnnnnnnnnnnnnnnnnnnnnnnnnnnnnnnnnnnnnnnnnnnnnnnnnnnnnnnnnnnnnnnnnnnnnnnnnnnnnnnnnnnnnnnnnnnnnnnnnnnnnnnnnnnnnnnnnnnnnnnnnnnnnnnnnnnnnnnnnnnnnnnnnnnnnnnnnnnnnnnnnnnnnnnnnnnnnnnnnnnnnnnnnnnnnnnnnnnnnnnnnnnnnnnnnnnnnnnnnnnnnnnnnnnnnnnnnnnnnnnnnnnnnnnnnnnnnnnnnnnnnnnnnnnnnnnnnnnnnnnnnnnnnnnnnnnnnnnnnnnnnnnnnnnnnnnnnnnnnnnnnnnnnnnnnnnnnnnnnnnnnnnnnnnnnnnnnnnnnnnnnnnnnnnnnnnnnnnnnnnnnnnnnnnnnnnnnnnnnnnnnnnnnnnnnnnnnnnnnnnnnnnnnnnnnnnnnnnnnnnnnnnnnnnnnnnnnnnnnnnnnnnnnnnnnnnnnnnnnnnnnnnnnnnnnnnnnnnnnnnnnnnnnnnnnnnnnnnnnnnnnnnnnnnnnnnnnnnnnnnnnnnnnnnnnnnnnnnnnnnnnnnnnnnnnnnnnnnnnnnnnnnnnnnnnnnnnnnnnnnnnnnnnnnnnnnnnnnnnnnnnnnnnnnnnnnnnnnnnnnnnnnnnnnnnnnnnnnnnnnnnnnnnnnnnnnnnnnnnnnnnnnnnnnnnnnnnnnnnnnnnnnnnnnnnnnnnnnnnnnnnnnnnnnnnnnnnnnnnnnnnnnnnnnnnnnnnnnnnnnnnnnnnnnnnnnnnnnnnnnnnnnnnnnnnnnnnnnnnnnnnnnnnnnnnnnnnnnnnnnnnnnnnnnnnnnnnnnnnnnnnnnnnnnnnnnnnnnnnnnnnnnnnnnnnnnnnnnnnnnnnnnnnnnnnnnnnnnnnnnnnnnnnnnnnnnnnnnnnnnnnnnnnnnnnnnnnnnnnnnnnnnnnnnnnnnnnnnnnnnnnnnnnnnnnnnnnnnnnnnnnnnnnnnnnnnnnnnnnnnnnnnnnnnnnnnnnnnnnnnnnnnnnnnnnnnnnnnnnnnnnnnnnnnnnnnnnnnnnnnnnnnnnnnnnnnnnnnnnnnnnnnnnnnnnnnnnnnnnnnnnnnnnnnnnnnnnnnnnnnnnnnnnnnnnnnnnnnnnnnnnnnnnnnnnnnnnnnnnnnnnnnnnnnnnnnnnnnnnnnnnnnnnnnnnnnnnnnnnnnnnnnnnnnnnnnnnnnnnnnnnnnnnnnnnnnnnnnnnnnnnnnnnnnnnnnnnnnnnnnnnnnnnnnnnnnnnnnnnnnnnnnnnnnnnnnnnnnnnnnnnnnnnnnnnnnnnnnnnnnnnnnnnnnnnnnnnnnnnnnnnnnnnnnnnnnnnnnnnnnnnnnnnnnnnnnnnnnnnnnnnnnnnnnnnnnnnnnnnnnnnnnnnnnnnnnnnnnnnnnnnnnnnnnnnnnnnnnnnnnnnnnnnnnnnnnnnnnnnnnnnnnnnnnnnnnnnnnnnnnnnnnnnnnnnnnnnnnnnnnnnnnnnnnnnnnnnnnnnnnnnnnnnnnnnnnnnnnnnnnnnnnnnnnnnnnnnnnnnnnnnnnnnnnnnnnnnnnnnnnnnnnnnnnnnnnnnnnnnnnnnnnnnnnnnnnnnnnnnnnnnnnnnnnnnnnnnnnnnnnnnnnnnnnnnnnnnnnnnnnnnnnnnnnnnnnnnnnnnnnnnnnnnnnnnnnnnnnnnnnnnnnnnnnnnnnnnnnnnnnnnnnnnnnnnnnnnnnnnnnnnnnnnnnnnnnnnnnnnnnnnnnnnnnnnnnnnnnnnnnnnnnnnnnnnnnnnnnnnnnnnnnnnnnnnnnnnnnnnnnnnnnnnnnnnnnnnnnnnnnnnnnnnnnnnnnnnnnnnnnnnnnnnnnnnnnnnnnnnnnnnnnnnnnnnnnnnnnnnnnnnnnnnnnnnnnnnnnnnnnnnnnnnnnnnnnnnnnnnnnnnnnnnnnnnnnnnnnnnnnnnnnnnnnnnnnnnnnnnnnnnnnnnnnnnnnnnnnnnnnnnnnnnnnnnnnnnnnnnnnnnnnnnnnnnnnnnnnnnnnnnnnnnnnnnnnnnnnnnnnnnnnnnnnnnnnnnnnnnnnnnnnnnnnnnnnnnnnnnnnnnnnnnnnnnnnnnnnnnnnnnnnnnnnnnnnnnnnnnnnnnnnnnnnnnnnnnnnnnnnnnnnnnnnnnnnnnnnnnnnnnnnnnnnnnnnnnnnnnnnnnnnnnnnnnnnnnnnnnnnnnnnnnnnnnnnnnnnnnnnnnnnnnnnnnnnnnnnnnnnnnnnnnnnnnnnnnnnnnnnnnnnnnnnnnnnnnnnnnnnnnnnnnnnnnnnnnnnnnnnnnnnnnnnnnnnnnnnnnnnnnnnnnnnnnnnnnnnnnnnnnnnnnnnnnnnnnnnnnnnnnnnnnnnnnnnnnnnnnnnnnnnnnnnnnnnnnnnnnnnnnnnnnnnnnnnnnnnnnnnnnnnnnnnnnnnnnnnnnnnnnnnnnnnnnnnnnnnnnnnnnnnnnnnnnnnnnnnnnnnnnnnnnnnnnnnnnnnnnnnnnnnnnnnnnnnnnnnnnnnnnnnnnnnnnnnnnnnnnnnnnnnnnnnnnnnnnnnnnnnnnnnnnnnnnnnnnnnnnnnnnnnnnnnnnnnnnnnnnnnnnnnnnnnnnnnnnnnnnnnnnnnnnnnnnnnnnnnnnnnnnnnnnnnnnnnnnnnnnnnnnnnnnnnnnnnnnnnnnnnnnnnnnnnnnnnnnnnnnnnnnnnnnnnnnnnnnnnnnnnnnnnnnnnnnnnnnnnnnnnnnnnnnnnnnnnnnnnnnnnnnnnnnnnnnnnnnnnnnnnnnnnnnnnnnnnnnnnnnnnnnnnnnnnnnnnnnnnnnnnnnnnnnnnnnnnnnnnnnnnnnnnnnnnnnnnnnnnnnnnnnnnnnnnnnnnnnnnnnnnnnnnnnnnnnnnnnnnnnnnnnnnnnnnnnnnnnnnnnnnnnnnnnnnnnnnnnnnnnnnnnnnnnnnnnnnnnnnnnnnnnnnnnnnnnnnnnnnnnnnnnnnnnnnnnnnnnnnnnnnnnnnnnnnnnnnnnnnnnnnnnnnnnnnnnnnnnnnnnnnnnnnnnnnnnnnnnnnnnnnnnnnnnnnnnnnnnnnnnnnnnnnnnnnnnnnnnnnnnnnnnnnnnnnnnnnnnnnnnnnnnnnnnnnnnnnnnnnnnnnnnnnnnnnnnnnnnnnnnnnnnnnnnnnnnnnnnnnnnnnnnnnnnnnnnnnnnnnnnnnnnnnnnnnnnnnnnnnnnnnnnnnnnnnnnnnnnnnnnnnnnnnnnnnnnnnnnnnnnnnnnnnnnnnnnnnnnnnnnnnnnnnnnnnnnnnnnnnnnnnnnnnnnnnnnnnnnnnnnnnnnnnnnnnnnnnnnnnnnnnnnnnnnnnnnnnnnnnnnnnnnnnnnnnnnnnnnnnnnnnnnnnnnnnnnnnnnnnnnnnnnnnnnnnnnnnnnnnnnnnnnnnnnnnnnnnnnnnnnnnnnnnnnnnnnnnnnnnnnnnnnnnnnnnnnnnnnnnnnnnnnnnnnnnnnnnnnnnnnnnnnnnnnnnnnnnnnnnnnnnntcttatcaacaatcgacatctccattatatcaatcataacagatggatgatacctttattagatgtaaaaagataaagtattttagatattactaatatatattagatatctttggatatagcacataatatacatttccaacgcacaagccaagtattctaattaacattagagttatgaaaaattcgatataaacacaacagcagggcaagaaatttaaccaacatcttattttacgatcgaggattaataaagaacataccaacgaggcatatttttaacggattaaataatgcatttccttctcttaatagttaatagtatataacaatacattagtcacatttaaacaaatcgcgactatagactttgtcgaccacatcgttcaactcctctgacattcggttagtgataataatatcagctttccctttaaagatcgccagctcccgttccaaaggtgagttaaagaatgtatctccagaaataagcggctcataaataattactttcacgccttttttcttgatacgctttataataccaagaatagaagaatctctaaaattatctgaaccacttttcataatcaaacgataaacccccacaacttgtggtctatgtttcaaaataacattagtgataaagtccttacgtgtacggttagcatcaacaattgcagatataagtttattcggaacagactgatagttggctaataattgcttggtatcttttggcaaacagtagccaccataaccaaaagaaggattattgtagtaattaccaatgcgcggatccaaacaaacaccgtcaataatctgacgcgtattcagaccaaaactttctgcgtaactatccaattcattaaaaaatgcaactcgcatagccaaataagtatttgaaaataacttaatcgcttccgcttccgtagaatctgtaaataaaacgggtatattttgtttaatcgctccttcctgaaataacactgccaaacgttctgcccgttcagaacattcaccgataataatgcgagatggatggagattatcgtatagggctcttccttctcgtaaaaattctggagagaagataatattattaatacctaaatgttctttaattgtttttgtgaaacctactgggaccgtagatttaaccaccataattgcgtttgggttgatttccgttacgtcacgaatgacagcttcaacgcttgatgtatcaaagtaatttgaacctgggtcataattcgttggtgtagcaataataacgtaattggcatttttataggcttcatatttgttagtagttgcgcgaaaattaagtattttagttgaaagataattttcaatttccttatcctctataggagagagtttatcattaagtaagtcaacttttttttgatgggtatcaaatgcaaccacttcatgattttgagccattagaattccatttgaaagcccaacgtaaccagcgcctgaaacagttatttttagtgttccgaacattttatatagccccaaaaatttaatatatatagaataacaaactattgttcaattattcctgatacatctttaaacaaaccatagcgagataataaaccacgtacatctttatcacttacgatacttttccctaacactcgttgtcttgccgcgatatcactatattctcttcgagattgtgatatatatccatcaggtagagcttctgttcctttattcctggtaagtccggagtctccccataaccccaatatcaatggctgcagtaatcttacaatactttctcgcccataacgcattattactgtttcataaaactccgtatctgcaccaattaaagattgtctatagccaccaactgtcgcaaaaatatctttttttatcattgacgatacaacagacattcttgtggctttatcatcatagaagaattgaatttttccatttgacgcaacacggatccagttagccatacagattacagccttattattgcgaagaacctcaacttgtctttgtattctctccggatgagaaagatcatctgcatcttgaaaggtgatgaaattaccgtgtgctttttttattagctcatttcttatattataagggccttggttttttcgtgagctatatactttcactcttgaatcagaataagctatgctcttaattatttcaaggcttttgtccgatgaacaatcatcgcacacgagaatttcaatattttcatatgtttgattcaacaatgaatgtaatgagtatgcaatagtatcttctgaattgaatactgacattattatactaacaagatcttttccataaacattttttttcttatcgaacttaattccttgcaatataattttatttgggtatatatcagttatttctgataaatcgtattttcgtagacatttgttaaattgactcctataaatattcatattatctattacagcattacaaataaaaagttcttgctcagggagtagattataactatcttgcatatcatcgtttgcatttaataataaagtcaggccataccctgcatcggcttgattatcaaatgctaaatatttatatccatttttagtataatcatgaaattttgaaaacttcgtacaaaaataaaaatctttttgtttgggcgacaattttagatggtttatatattcgatatatcgttcaaaaataagattaatgagaaaatcactccttgaataccgtagagcgttacttatatgttcaaaaagcttaactcgttcgccatttttaaaataacgagattgaattgttagataacaaacaattttaatataagtatccaacataccaacttttctaagagaatctgcatatcccaataaataagaaaactcattgccagaattctgagctgatacattcttagatagttcaagtacattgtcgtattcgtttattcttttgtgaataaggttatcgttaccttttaaaggcgagtttttatgttgaagatcaactttctccttatgaattgataataaaaaatcaagagcaccaatatttgtccctaatttctttttacgttcaactaaatttatatattctgcgttcatacattcacttaatgataaataaaatgagaataaaactgcatttactaaatattataaatataaatctttaaaaacatcactaaaactcaacgaatgtcacagtgtaagctcacagagatattgcaattatctccggacaagcgagggaaatgctaagttgatgcaacgtatctgcggcggatatttgaggcattaccatgccaacatctatgtgatgaaacactttgttatacctgagattacaaaattaaggatgaaaaaatatacttctgggagaaacatgagatcaatacagttgcggaagtttttgctgtatccacacgaacgctgtattatggcccagaggcacctatttcgcgtagcaaagctccgctagtacatcgcacaaagcaatggcatctcgtaattctgtaagaaatacgtcgactgagaatagagcttcccaacctagaagaacagatttttgtttgcttgaagccgtggagtgaacagcaccgcctggtctgtccgagcatttcaaccatcggcaggatgttcacggccgcacacgataaaatgcgactgataccgatgtgactgcctccccaaggaaaaacactgttcataaaaaatacaatcctccaacccgcagatcaaaacgctatcgcccggtaaagagcagtgagctcgttggtatagatgctattgagctcagaatgggcgagctgcgctgttatgtcattaccatgatcgacgaacacagcaactacgctctggcacaggccgtgccgtcacttaactgtgatatcatcaaactcttcttttgccgtgcagaccggctattccctatcgatatcaaccagggcatcgcagataacgggaaagagttcccaggaaacttcgacaaagcaccgcaggaatccgctagcaagccctatggacctacccctttacgcctagaacgcacctctgaacgttttaagcgaacgccgaaagaacagttcattgaatttaaataaatagactctttaaagagctaaacatatttaatcagaaactagctgaaaacctagtactatactgcagtaaaagacagcatgaagtgctcgaattactgacaccagaagaaaatattttacgagagaacaaaatttgcaatatgtggcgaatctatacggtcacttgcaaaagtataaattggtattataatgcgtgatattatataaataaaataactaactattttaacgaaagcaaaacaccacaaagagaaaaataaaatttgcaatatatctcattagggttcacatttttaacagcccttgattttagctctcctatatttataaacaacaacaattaacttaaatggaagggtaatgaatccaaatatcgaattagcactggagataatagcctgccctaattgataagataaatgtttcttaactctttcagccttatcagcatcagcatataaatagagtggcacatcaacgccataactcttcttacgttttttttcaaaaacacactcacggataagtgcaaatggcatggtaataatccccttgagggatttagaatacgagactataatataaccaagtcgataacctaactcttgttttatctgctcagctgctccatatagcacaggtggaagtttctttttaatttcctgattttctataaaatagtgttccaactgctcttgcactatatgcaattgttttaaaatctgttctttttctgatattgcctgagtgagttttgattctttttcgcttatctcttcttcatatttatgcaattgttttaaaatctgttctttttctgatattgcctgagtgagttttgattctttttcgcttatctcttcttcatatttctgtatgtcatttatttttttttcaatatcatctggatatttttcttgtctcacaacatcgttgtgatttatttttgaaagtttaattacctcttccttttctttttttagctcattaatcctgttcaataataaaaattgtcttttcttaaatatagatttagtcaattcaatatctgcatccttcttttttgactcttgcaccaaatgagatacaatattgaagatagaatttctctcttcgactacctcccataatgcagcctcagccgaaacgttatctttcgatgtttctatataaggtaggtttgcataggcttgtaactcattataaagcttcagaacctcggttctttcttttattaattcagatactaagtactcactaacctttgtatcattaaatgtaatttcagtctcatttgcacttaaagaaaataaagttgtatatttttcaagcagggcaatttcatttgattttgtataatcattattctcaaccacatcaaacaatattgaatttttgtaatgcgcagacattagattatctatttttataatattactcaatggctttataatatttttcttattgctttgaaacgcctcaaaattaatcaacacacatcgttctttattctccaaaaaaaaatcaagcaatcttttattatatgcaatccagttatctacactattatttatatttaaagagagaggggcattatttactgaacgcattaaattatatttagggtgatcatatatcatgatgaattttatgcttttatctatatttttccaaaaatcaagaaaaaatattatagatggatctgcccacccccaaagtttgttatttagattgttcatcattagttcaagaaccatgctatcccacatggttgagacttgaacagctgagaattctctctcatctactacatcattaacttctggtgtttgataaaattgacataatgaagcggtgatatattctggggaaattttattacttgtagaataatttggtgagttcatgccaatttctttcaaaaaatgttcaactatctgatactttgagccaggatgtccgactagcactaatttattcatcatatttcctctttattatctacaagattactttattttaaacactgtcgtttatcgtaatggtgatattgcagacatatatttcaaatctgtaatgtaatttaggtggcgttatgtgataatactaaatgaaactatctatatctcaatagcacatctgatttatttggtatagccattcatcaataaacaatatcaatataactcagagcacctcctaataattgacatattgcgttaccaccttcttttagacaaaaatcttaattataaactctaccaaactaacgctgatatttttcaaaatcataannnnnnnnnnnnnnnnnnnnnnnnnnnnnnnnnnnnnnnnnnnnnnnnnnnnnnnnnnnnnnnnnnnnnnnnnnnnnnnnnnnnnnnnnnnnnnnnnnnnnnnnnnnnnnnnnnnnnnnnnnnnnnnnnnnnnnnnnnnnnnnnnnnnnnnnnnnnnnnnnnnnnnnnnnnnnnnnnnnnnnnnnnnnnnnnnnnnnnnnnnnnnnnnnnnnnnnnnnnnnnnnnnnnnnnnnnnnnnnnnnnnnnnnnnnnnnnnnnnnnnnnnnnnnnnnnnnnnnnnnnnnnnnnnnnnnnnnnnnnnnnnnnnnnnnnnnnnnnnnnnnnnnnnnnnnnnnnnnnnnnnnnnnnnnnnnnnnnnnnnnnnnnnnnnnnnnnnnnnnnnnnnnnnnnnnnnnnnnnnnnnnnnnnnnnnnnnnnnnnnnnnnnnnnnnnnnnnnnnnnnnnnnnnnnnnnnnnnnnnnnnnnnnnnnnnnnnnnnnnnnnnnnnnnnnnnnnnnnnnnnnnnnnnnnnnnnnnnnnnnnnnnnnnnnnnnnnnnnnnnnnnnnnnnnnnnnnnnnnnnnnnnnnnnnnnnnnnnnnnnnnnnnnnnnnnnnnnnnnnnnnnnnnnnnnnnnnnnnnnnnnnnnnnnnnnnnnnnnnnnnnnnnnnnnnnnnnnnnnnnnnnnnnnnnnnnnnnnnnnnnnnnnnnnnnnnnnnnnnnnnnnnnnnnnnnnnnnnnnnnnnnnnnnnnnnnnnnnnnnnnnnnnnnnnnnnnnnnnnnnnnnnnnnnnnnnnnnnnnnnnnnnnnnnnnnnnnnnnnnnnnnnnnnnnnnnnnnnnnnnnnnnnnnnnnnnnnnnnnnnnnnnnnnnnnnnnnnnnnnnnnnnnnnnnnnnnnnnnnnnnnnnnnnnnnnnnnnnnnnnnnnnnnnnnnnnnnnnnnnnnnnnnnnnnnnnnnnnnnnnnnnnnnnnnnnnnnnnnnnnnnnnnnnnnnnnnnnnnnnnnnnnnnnnnnnnnnnnnnnnnnnnnnnnnnnnnnnnnnnnnnnnnnnnnnnnnnnnnnnnnnnnnnnnnnnnnnnnnnnnnnnnnnnnnnnnnnnnnnnnnnnnnnnnnnnnnnnnnnnnnnnnnnnnnnnnnnnnnnnnnnnnnnnnnnnnnnnnnnnnnnnnnnnnnnnnnnnnnnnnnnnnnnnnnnnnnnnnnnnnnnnnnnnnnnnnnnnnnnnnnnnnnnnnnnnnnnnnnnnnnnnnnnnnnnnnnnnnnnnnnnnnnnnnnnnnnnnnnnnnnnnnnnnnnnnnnnnnnnnnnnnnnnnnnnnnnnnnnnnnnnnnnnnnnnnnnnnnnnnnnnnnnnnnnnnnnnnnnnnnnnnnnnnnnnnnnnnnnnnnnnnnnnnnnnnnnnnnnnnnnnnnnnnnnnnnnnnnnnnnnnnnnnnnnnnnnnnnnnnnnnnnnnnnnnnnnnnnnnnnnnnnnnnnnnnnnnnnnnnnnnnnnnnnnnnnnnnnnnnnnnnnnnnnnnnnnnnnnnnnnnnnnnnnnnnnnnnnnnnnnnnnnnnnnnnnnnnnnnnnnnnnnnnnnnnnnnnnnnnnnnnnnnnnnnnnnnnnnnnnnnnnnnnnnnnnnnnnnnnnnnnnnnnnnnnnnnnnnnnnnnnnnnnnnnnnnnnnnnnnnnnnnnnnnnnnnnnnnnnnnnnnnnnnnnnnnnnnnnnnnnnnnnnnnnnnnnnnnnnnnnnnnnnnnnnnnnnnnnnnnnnnnnnnnnnnnnnnnnnnnnnnnnnnnnnnnnnnnnnnnnnnnnnnnnnnnnnnnnnnnnnnnnnnnnnnnnnnnnnnnnnnnnnnnnnnnnnnnnnnnnnnnnnnnnnnnnnnnnnnnnnnnnnnnnnnnnnnnnnnnnnnnnnnnnnnnnnnnnnnnnnnnnnnnnnnnnnnnnnnnnnnnnnnnnnnnnnnnnnnnnnnnnnnnnnnnnnnnnnnnnnnnnnnnnnnnnnnnnnnnnnnnnnnnnnnnnnnnnnnnnnnnnnnnnnnnnnnnnnnnnnnnnnnnnnnnnnnnnnnnnnnnnnnnnnnnnnnnnnnnnnnnnnnnnnnnnnnnnnnnnnnnnnnnnnnnnnnnnnnnnnnnnnnnnnnnnnnnnnnnnnnnnnnnnnnnnnnnnnnnnnnnnnnnnnnnnnnnnnnnnnnnnnnnnnnnnnnnnnnnnnnnnnnnnnnnnnnnnnnnnnnnnnnnnnnnnnnnnnnnnnnnnnnnnnnnnnnnnnnnnnnnnnnnnnnnnnnnnnnnnnnnnnnnnnnnnnnnnnnnnnnnnnnnnnnnnnnnnnnnnnnnnnnnnnnnnnnnnnnnnnnnnnnnnnnnnnnnnnnnnnnnnnnnnnnnnnnnnnnnnnnnnnnnnnnnnnnnnnnnnnnnnnnnnnnnnnnnnnnnnnnnnnnnnnnnnnnnnnnnnnnnnnnnnnnnnnnnnnnnnnnnnnnnnnnnnnnnnnnnnnnnnnnnnnnnnnnnnnnnnnnnnnnnnnnnnnnnnnnnnnnnnnnnnnnnnnnnnnnnnnnnnnnnnnnnnnnnnnnnnnnnnnnnnnnnnnnnnnnnnnnnnnnnnnnnnnnnnnnnnnnnnnnnnnnnnnnnnnnnnnnnnnnnnnnnnnnnnnnnnnnnnnnnnnnnnnnnnnnnnnnnnnnnnnnnnnnnnnnnnnnnnnnnnnnnnnnnnnnnnnnnnnnnnnnnnnnnnnnnnnnnnnnnnnnnnnnnnnnnnnnnnnnnnnnnnnnnnnnnnnnnnnnnnnnnnnnnnnnnnnnnnnnnnnnnnnnnnnnnnnnnnnnnnnnnnnnnnnnnnnnnnnnnnnnnnnnnnnnnnnnnnnnnnnnnnnnnnnnnnnnnnnnnnnnnnnnnnnnnnnnnnnnnnnnnnnnnnnnnnnnnnnnnnnnnnnnnnnnnnnnnnnnnnnnnnnnnnnnnnnnnnnnnnnnnnnnnnnnnnnnnnnnnnnnnnnnnnnnnnnnnnnnnnnnnnnnnnnnnnnnnnnnnnnnnnnnnnnnnnnnnnnnnnnnnnnnnnnnnnnnnnnnnnnnnnnnnnnnnnnnnnnnnnnnnnnnnnnnnnnnnnnnnnnnnnnnnnnnnnnnnnnnnnnnnnnnnnnnnnnnnnnnnnnnnnnnnnnnnnnnnnnnnnnnnnnnnnnnnnnnnnnnnnnnnnnnnnnnnnnnnnnnnnnnnnnnnnnnnnnnnnnnnnnnnnnnnnnnnnnnnnnnnnnnnnnnnnnnnnnnnnnnnnnnnnnnnnnnnnnnnnnnnnnnnnnnnnnnnnnnnnnnnnnnnnnnnnnnnnnnnnnnnnnnnnnnnnnnnnnnnnnnnnnnnnnnnnnnnnnnnnnnnnnnnnnnnnnnnnnnnnnnnnnnnnnnnnnnnnnnnnnnnnnnnnnnnnnnnnnnnnnnnnnnnnnnnnnnnnnnnnnnnnnnnnnnnnnnnnnnnnnnnnnnnnnnnnnnnnnnnnnnnnnnnnnnnnnnnnnnnnnnnnnnnnnnnnnnnnnnnnnnnnnnnnnnnnnnnnnnnnnnnnnnnnnnnnnnnnnnnnnnnnnnnnnnnnnnnnnnnnnnnnnnnnnnnnnnnnnnnnnnnnnnnnnnnnnnnnnnnnnnnnnnnnnnnnnnnnnnnnnnnnnnnnnnnnnnnnnnnnnnnnnnnnnnnnnnnnnnnnnnnnnnnnnnnnnnnnnnnnnnnnnnnnnnnnnnnnnnnnnnnnnnnnnnnnnnnnnnnnnnnnnnnnnnnnnnnnnnnnnnnnnnnnnnnnnnnnnnnnnnnnnnnnnnnnnnnnnnnnnnnnnnnnnnnnnnnnnnnnnnnnnnnnnnnnnnnnnnnnnnnnnnnnnnnnnnnnnnnnnnnnnnnnnnnnnnnnnnnnnnnnnnnnnnnnnnnnnnnnnnnnnnnnnnnnnnnnnnnnnnnnnnnnnnnnnnnnnnnnnnnnnnnnnnnnnnnnnnnnnnnnnnnnnnnnnnnnnnnnnnnnnnnnnnnnnnnnnnnnnnnnnnnnnnnnnnnnnnnnnnnnnnnnnnnnnnnnnnnnnnnnnnnnnnnnnnnnnnnnnnnnnnnnnnnnnnnnnnnnnnnnnnnnnnnnnnnnnnnnnnnnnnnnnnnnnnnnnnnnnnnnnnnnnnnnnnnnnnnnnnnnnnnnnnnnnnnnnnnnnnnnnnnnnnnnnnnnnnnnnnnnnnnnnnnnnnnnnnnnnnnnnnnnnnnnnnnnnnnnnnnnnnnnnnnnnnnnnnnnnnnnnnnnnnnnnnnnnnnnnnnnnnnnnnnnnnnnnnnnnnnnnnnnnnnnnnnnnnnnnnnnnnnnnnnnnnnnnnnnnnnnnnnnnnnnnnnnnnnnnnnnnnnnnnnnnnnnnnnnnnnnnnnnnnnnnnnnnnnnnnnnnnnnnnnnnnnnnnnnnnnnnnnnnnnnnnnnnnnnnnnnnnnnnnnnnnnnnnnnnnnnnnnnnnnnnnnnnnnnnnnnnnnnnnnnnnnnnnnnnnnnnnnnnnnnnnnnnnnnnnnnnnnnnnnnnnnnnnnnnnnnnnnnnnnnnnnnnnnnnnnnnnnnnnnnnnnnnnnnnnnnnnnnnnnnnnnnnnnnnnnnnnnnnnnnnnnnnnnnnnnnnnnnnnnnnnnnnnnnnnnnnnnnnnnnnnnnnnnnnnnnnnnnnnnnnnnnnnnnnnnnnnnnnnnnnnnnnnnnnnnnnnnnnnnnnnnnnnnnnnnnnnnnnnnnnnnnnnnnnnnnnnnnnnnnnnnnnnnnnnnnnnnnnnnnnnnnnnnnnnnnnnnnnnnnnnnnnnnnnnnnnnnnnnnnnnnnnnnnnnnnnnnnnnnnnnnnnnnnnnnnnnnnnnnnnnnnnnnnnnnnnnnnnnnnnnnnnnnnnnnnnnnnnnnnnnnnnnnnnnnnnnnnnnnnnnnnnnntggatgtcgggcgtccgcaaagtcgggggatgcagggcagcgtggtggccaacagccgtctggacgggctgaatatcgtttcaacaaccgcgtttccggtggaaatgcttgagcgcatggatgtgcttaacagtttgaccggcgcgctgtacggcccggcgagcccagcagggcagtttaatttcgtggcgaagcgcccaaccgaagagacgctgcgtaaagtgacgctgggctatcaaagccgcagtgcgtttaccggccatgccgatctgggtggccattttgatgaaaacaaacggtttggctatcgcgtgaacctgcttgatcaggaaggggaaggcaatgtggatgacagcacgctgcgtcgcaaactcgtttccgttgcgctcgactggaatattcagccgggcactcagctacagctcgacgccagccattacgaatttatccagaaaggctatgtcggtagctttaactatgggccgaacgtcaaactgccnnnnnnnnnnnnnnnnnnnnnnnnnnnnnnnnnnnnnnnnnnnnnnnnnnnnnnnnnnnnnnnnnnnnnnnnnnnnnnnnncnnnnnnnnnnnnnnnnnnnnnnnnnnnnnnnnnnnnnnnnnnnngnnnnnnnnnnnnnnnnnnnnnnnnnnnnnnnnnnnnnnnnnnnnnnnnnnnnnnnnnnnnnnnnnnnnnnnnnnnnnnnnnnnnnnnnnnnnnnnnnnnnnnnnnnnnnnnnnnnnnnnnnnnnnnnnngnnnnnnnnnnnnnnnnnnnnnnnnnnnnnnnnnnnnnnnnnnnnnnnnnnnnnnnnnnnnnnnnnnnnnnnnnnnnnnnnnnnnnnnnnnnnnnnnnnnnnnnnnnnnnnnnnnnnnnnnnnnnnnnnnnnnnnnnnnnnnnnnnnnnnnnnnnnnnnnnnnnnnnnnnnnnnnnnnnnnnnnnnnnnnnnnnnnnnnnnnnannnnnnnnnnnnnnnntnnnnnnnnnnnnnnnnnnnnnnnnnnnnnnnnnnnnnnnnnnnnnnnnnnnnnnnnnnnnnnnnnnnnnnnnnnnnnnnnnnnnnnnnnnnnnnnnnnnnnnnnnnnnnnnnnnnnnnnnnnnnnnnnnnnnnnnnnnnnnnnnnnnnnnnnnnnnnnnnnnnnnnnnnnnnnnnnnnnnnnnnnnnnnnnnnnnnnnnnnnnnnnnnnnnnnnnnnnnnnnnnnnnnnnnnnnnnnnnnnnnnnnnnnnnnnnnnnnnnnnnnnnnnnnnnnnnnnnnnnnnnnnnnnnnnnnnnnnnnnnnnnnnnnnnnnnnnnnnnnnnnnnnnnnnnnnnnnnnnnnnnnnnnnnnnnnnnnnnnnnnnnnnnnnnnnnnnnnnnnnnnnnnnnnnnnnnnnnnnnnnnnnnnnnnnnnnnnnnnnnnnnnnnnnnnnnnnnnnnnnnnnnnnnnnnnnnnnnnnnnnnnnnnnnnnnnnnnnnnnnnnnnnnnnnnnnnnnnnnnnnnnnnnnnnnnnnnnnnnnnnnnnnnnnnnnnnnnnnnnnnnnnnnnnnnnnnnnnnnnnnnnnnnnnnnnnnnnnnnnnnnnnnnnnnnnnnnnnnnnnnnnnnnnnnnnnnnnnnnnnnnnnnnnnnnnnnnnnnnnnnnnnnnnnnnnnnnnnnnnnnnnnnnnnnnnnnnnnnnnnnnnnnnnnnnnnnnnnnnnnnnnnnnnnnnnnnnnnnnnnnnnnnnnnnnnnnnnnnnnnnnnnnnnnnnnnnnnnnnnnnnnnnnnnnnnnnnnnnnnnnnnnnnnnnnnnnnnnnnnnnnnnnnnnnnnnnnnnnnnnnnnnnnnnnnnnnnnnnnnnnnnnnnnnnnnnnnnnnnnnnnnnnnnnnnnnnnnnnnnnnnnnnnnnnnnnnnnnnnnnnnnnnnnnnnnnnnnnnnnnnnnnnnnnnnnnnnnnnnnnnnnnnnnnnnnnnnnnnnnnnnnnnnnnnnnnnnnnnnnnnnnnnnnnnnnnnnnnnnnnnnnnnnnnnnnnnnnnnnnnnnnnnnnnnnnnnnnnnnnnnnnnnnnnnnnnnnnnnnnnnnnnnnnnnnnnnnnnnnnnnnnnnnnnnnnnnnnnnnnnnnnnnnnnnnnnnnnnnnnnnnnnnnnnnnnnnnnnnnnnnnnnnnnnnnnnnnnnnnnnnnnnnnnnnnnnnnnnnnnnnnnnnnnnnnnnnnnnnnnnnnnnnnnnnnnnnnnnnnnnnnnnnnnnnnnnnnnnnnnnnnnnnnnnnnnnnnnnnnnnnnnnnnnnnnnnnnnnnnnnnnnnnnnnnnnnnnnnnnnnnnnnnnnnnnnnnnnnnnnnnnnnnnnnnnnnnnnnnnnnnnnnnnnnnnnnnnnnnnnnnnnnnnnnnnnnnnnnnnnnnnnnnnnnnnnnnnnnnnnnnnnnnnnnnnnnnnnnnnnnnnnnnnnnnnnnnnnnnnnnnnnnnnnnnnnnnnnnnnnnnnnnnnnnnnnnnnnnnnnnnnnnnnnnnnnnnnnnnnnnnnnnnnnnnnnnnnnnnnnnnnnnnnnnnnnnnnnnnnnnnnnnnnnnnnnnnnnnnnnnnnnnnnnnnnnnnnnnnnnnnnnnnnnnnnnnnnnnnnnnnnnnnnnnnnnnnnnnnnnnnnnnnnnnnnnnnnnnnnnnnnnnnnnnnnnnnnnnnnnnnnnnnnnnnnnnnnnnnnnnnnnnnnnnnnnnnnnnnnnnnnnnnnnnnnnnnnnnnnnnnnnnnnnnnnnnnnnnnnnnnnnnnnnnnnnnnnnnnnnnnnnnnnnnnnnnnnnnnnnnnnnnnnnnnnnnnnnnnnnnnnnnnnnnnnnnnnnnnnnnnnnnnnnnnnnnnnnnnnnnnnnnnnnnnnnnnnnnnnnnnnnnnnnnnnnnnnnnnnnnnnnnnnnnnnnnnnnnnnnnnnnnnnnnnnnnnnnnnnnnnnnnnnnnnnnnnnnnnnnnnnnnnnnnnnnnnnnnnnnnnnnnnnnnnnnnnnnnnnnnnnnnnnnnnnnnnnnnnnnnnnnnnnnnnnnnnnnnnnnnnnnnnnnnnnnnnnnnnnnnnnnnnntcagttcagggtgacgctcatcagccggacatacggaccaaaactgtccttacggcgttctgcaaacacggccagcacaccgggaatatcctgcacttcacgaccggtatacgcttcagcactgccgtgccagcggtatttgccggtacagaacggaaaaagacgggatgccggatgctgacggtgaatacgcatggcttcgccacgggtgatgattttcatagtgggatacctctgaagacagaagataaaagtgaaaacaggtgtgatgtggttgtgacgggttaaagcagaccatattcggcaaaggagaaaacctggctgccaccgactatcagatggtccggcacccggatatccaccaggcccagtgcctgtaccagacgttccgtgataaggcggtctgccttgctgggtgtgacttcaccggacgggtgattgtgtgccagcaccacagcagcggcattgtgatacagggcgcgtttaatcacttcccggggatggacttccgtgcggttgatggtgccggtgaagagggtttcaccggcaatcagctgattctggttgttcagatacagcacccggaactcttcacgctccagtcccgccatgttcagaatcagccattctcgtgccgcacgggtggaggtgaaggccacgccgggttcatgaagatggcggtccagggttttcagggcccgttgaatgaggctgcgctcgccgggcgtcatctctccgggcagaaaggaaagctgttgcattgtacttctctccattcagtcgatgatgcgcataatggcgctgcattccggatgctgcagggcgtaatcccgcagccggtaataatggaccgtcatggcataacactccgtacgacaggcatgatgactgtacgtcatcagacaggcagcaatgccggcggcttccgggctcatttcagcgcggttaccgttcatggcattgaacagtacccatgtttcgtcatcatcgtcatccggttcgggtgccataaatgccccgccgttgttcagggtgtacagattccagataccaccgcagtagtcttcacacagacggtccatccagccgaagatacggggctccagggtcacccactgtggaatgaggccaaagtgctgcggccagaagctgatgcgccgttcatcagggacgggagtggctaccagtttttgcaggtcagtctccggtgcacaggccgaagaggtggtgttctgagacaatgttttcatgtatgaaatccttgtaatgtgaataaatgagagggagtaaaggtcgggagctggcaacatcacgttcatcactgaccgtgatgacccggtaatatcagggatgaatgatattcggctgaaattccggacagccgtacgcgtaaccgttccggtcacagacggatggccagatgccattgcctgtatactcagtctgcacagactgatttctccgggacggtaaagcagacgggtacaccaggcgcacaggtcatcatcagaaatggaacgacaccccggcagcgcctccggggcgtcgggtgattctggtgcctgaatcacgccttcagggacatgctgcatcagcgcaggctctccagcagcgtttctgccattacccacaatgcgcggttgagcttaatatcggtgtcgatgttgtgaatggcacgggtgtggatacgttttccttttgcactgcggccggaaattccgcctttcagcatattctcctggatggtctgatatgcgctccacaggtctttaccgtaatcctcccggcgtcgtggtgtcagaatgtcagcggtggtgactggctgatgttcgtcaccataacggtaagtcagtgccgcctgtgccagcgcctggcgtgtcggtggcggcaggaccagcgactgcatggcatcacgcttttcctcaatccggtcaaacacgcccaccacctcgtaagccccttcaatgactctgtccaccacatttccccgatgcggaacacgcacttcccccggagactgaccacagacgcatccgttctgacagacgaacctgaagtaacccggcagcatctggtagctggaggtaccgtcatgggagttgagcagaatgatttcagggacatgttctccgtttatctctccggcccgccgcagacgcagcatgtgttttgtgtatccccggcggcccgggtcgcgcacacgggtctggcaggcgaagaatggctgaaagccttcccgctgcaggctttccagtacggtgatggtgggaatgtacgcatatcgtttactgcgggaagtatgccggtcttcaccgaaaatactgggaacatagtgcatcagttcttcgtgtgtcagcggacggtcacggcgtatctggttcgtataaccaaaacgactggctagtcgcataatttgctccttatcggtggttaagatttactggtgtaataaatgaaaaagccacgtctcccggagaagacgcggcctgacagatgaaatgaatgacgtttattgtctgagaagcccttaactggcgagctgagtattaagctgtgttccggcatcaccagcgcaactgaccttcagcattacggataaccagccgggaatatgttccctggtcatcttcagtaaacacattgcggtaagctgttttgacggcaacagcctgttcgcgtgagaaagggccttcgggcaataaacgtgatgtacaacccggcatatctgttgctccctgaaagtaaaaagccccggtcatgatgaccggggcctgaaggagagtgacctgattatcagaaagtcacattcagcgtggcctgaccgttataaccttcagcgctgctgccgctgacgctgtgggcataaccgccctgaacgcccagggtgatattttcccggacacgggcttccagtccggcctgcaggtccagtgacgtgccattccgggacggtgagaacgtcatgttactgccggcggcggctgtacccatgctcatgtcaccccgggagctgaaggtgcggataacagaaggctgtacccaccagttcaccggcagttcacgcacacggtgttttgcactgtcgcgcagggtgtcacgggatgaggtgccttcaccaaagctcatatcgttgtggctgcccagacggaaaccggcacgcacatgttgtgcactgccatgcccaaacttcacataaccggcgttatcctggccgtcatccagggaaagtccctgccaggtatactgcagttgtggctccagcatcaggttgtcagtgatactgaagggcagaccggtttccagtgagcccagccagccccagccccgggcgcggaagtcgttattgtccgatgacgctttcatgctgtggcgggttccctgtgccacaatgtcagcccacaggccggaggacgtgtgtgtcagattcaggtatccgcccaggctgccggcatcatcccggaccgtgccggcgcgggaaccgtcatcatccttaacatcaacggaagaatggcctgcggcaccatacacccctgtcgtcagagacataccggcaacctctgttctcagcaggtcaccctccagacggacgaagccatagctgccgctgctttccggcgtggctccacgggcaataccgccgttgttatcgtgaccgagatgaccgccctgaatgctgagacggacgctgttattttcaccgtttacaccggtctgatggctgcgggagcctgccagaatccggtcatagtccattgcctgtgtcagcatggatgtatacagggggacttcagcacgataagcattttcactgcgcaggtaccagtcttcatcgctgtcacggttcagggtgtagttaaaggcgccggcctgaagcgggcgactcagggcaaacgcaccttcttctgtggtagcgccattctgtgcatccacaacccggataccctgtccggtggttgccaccccgaggttactgtttccgacatttgtaaacgcaagccaggttttgccggttgcctgaccaccattaatcaccagctggtcagaggcattgctgccatcaaggcgaacacgcatattgatagtgccaccctgaccggtgaggttactggttgtcagtttatggaacgttaccggggcgttgccttttgcaacagcacggctcagtacggcatccggtgttgtctgattgtcaaagtaaatctcccctgcgttaacaatatcgccggtactgaccacatcaccattcagtaccatgctggcgcctttactgagctgtgttctgccactcagacttcccccggcagccagcatcagtgttccacgatgtccgacagtggtgttgctggcctgtcccccggcattaaccgtaaagctgccgccattttccagcagcaggccgctggcctgaccggatatgccatcaatactgaacttaccgctggcattggtcccctcaacagtggcaccactgtctgcaatcagggcaccaccggatgtcatggtgacacctgttgccttaccaccggcagacactgccagggtaccgccgtcatccacccgtgttttctgcgctgaatggccttccagtacatccaggcgaccaccggactccagaacaacgccgtcagccttaccgttttccaccgtgaaattgcccagacggttgctgccaagaaccgttgccgcagtactggtgaccagtgctccaccctgtttcagggtgacatgtgtggcggtaccaccggcgttcacctgcagtttgcctttctggttaacggtggtattttcagccactgccccatccttcactacctgccagccgtcactgtttacaacagtgccagacgctgtaccgccgttgtgcacatactggtaccccccattcagcgtggtatccagtgcgtgaccatgtaccgtctggtcgccgccggcataaaccacagtggtatttgctgttccttcagcagccacaatctgacgaccatttttattgatggtggtacgtacggcatttccgcgaacaaactgcccggtatcaccattttctgcatccggtcccccttctgcgccggtattcacaaccgtgtcggttgccactgcgccggatttgacggcctgccagcccttctcattaatgacggtaaccgttgcaatcccgccttcatgtacccactgctcaccgccgttcagagtggtattcactgcctgcccctgaaggctctgtccgcctccggcactgataaccgtgtctgaaacgcttcctccggcattcactctctgaagaccaccaccggtgacagtagtgttgttggcgataccgccattttgtatccattgcccgccggtattggcctcgttatccggcccatactccagaccggtactgatggtcattccgttggccgtaccgaagacaatctggttgtcatgatttgtcagtgttccgccgctcacggtttctcccgcctgtacgaccgtgtcagcagccagtaccgggactgacgtgacagcagcaagagacagcgcaaccgccacaccggtgcgttttccccgtgagcgcgccagttcggaagccaccaccagggtgcccgtaatgtgattccataccagcctgtagctggtgttcagatgtcgtttcatcagcttttccttacagagggtgaataaaaaagccggtacccacaaatgtggataccggcaggtacaaaacagcatggtcagataaagtggtttttcccggacataaatgcttcccctctctcatccgccagagaagtatcagtccgttgtgtgcaattccgttctgcatgatgaagagattcagctgcattttcgcagaccattaaccactataaacgatcgatagtaacgatcgatacctgttttatcgatcgttttattctattaacagcaaggcagtcacgcaagagaaagaggtgggtctgaggtgtttgtgtcatgttttcagttggttaacgcaatgtaatcaggcatttcccctggcagagtgttcagaagaaaatccagttccatacagcgcgggcaacagagaccaccgagtcacggacggcacgcagaaccgcgcgtgcaacagaggcaatacagacgctctccgcagtgtcaaatatccggtccaccgcaccggtaaactgttcacgggcctgagaccggacagattccgtgcgcagctcgtcctgcaggcgggtcatcaggggactggcggcatggtcgggaagcgctgtcatgagcgcactgaccagcgtatccagttcccagccggtgcaggccgatacggccacaaccggatgtacgggccggaacagccggaataccgcatctgttttctcacgaatgttctgtgcctgtgcgggagaaggctgaatgccggccatatcccattcatggcagggctccgttttgtcggcctgcgtcaccacaaacagcacctgctgatgtccccggtgcaggatgtgtcgccagaaatactcatccacagacagggcacggtcatcggctttaatcagccacagtaccaggtcaagttcaggcagaatgtcacggtacagggcttcatactctgcatccctgtcccggctctcgcccaccccgggcaggtcagtgataatcatgctgtgaccgtggccactcagacggaagcgccgcacttcccgggtgccggcgtgaacatcactgaccggggtgacctccccctgaaacagtgcattacagagtgaggatttaccggccccgcttttacccataatgccaatcacgggttcgtgactggtgagtttgcgcagatgttccaggatgtgacgggaaagtgagtaaggcagggaggagagcggtttttcaattgcctcaatggcatcagacggattcatacatgtattcccggtgaaaaaagacaaaacccccgcacaccggaaaggtggcgggggactcacggagataatatatgtctgaaattatctggaatgtcggtaccttttatactcttcaacaatcaggtcatgcagcatttcgccggtactgagtcttctgaccctcgataattctttgagctgcgccctggtttctgcgtcaagaaaaaactgtacattgactttatcttcctgcatttttttgtacttgcgctgcgccttggccttattgaaactgtttctgaaattttttatatcgtcaggtgaggtgagtggacaggtaacccatatgtcaaatgaaaggtgaattgcgtggtaaatatcagcagaaccaggaaaactggccagtttttccagtgcaatattttttcccttcaaataattccatgtccatatgcattcatgttcgttctccgggaggaggtaactgaaaggactctttgatttaaatgcccgcatccatctgtctttggtctggattatccactcatcccgcaaattcttatcagaaagaatatcgagaactctgagtatttgtctgaactgtgtcgatgagtccgacgggaaggcattcccttccagatactcttctttaagatacagtttattcttttgaagcaagtctgcgcttatttttgccctgttattctggataaactgcatcaacagataccaggaaaataagcatgcgcgttcactgcccgcgatccaggatattttttccagggggaccaggaaggccagggccttcagacgcataccagaaattatttgttcaagttcaaaatctgaaagtgtgatgttcagattttctctgtttttttttatgtaagcgataaaacgttccgggggatcataaacattaaggggcagtacggagatattacgctctccaagataataagagtaatacgcatttgttctttcattcataaccttatccgacaaaattttctgaaccatcctctttctccggttgcttaaaaattaaacataataaggtgataataacatgataaaaagaagtttataatagtatattaaggtggtcaataaaaaggcaatctgcgcgctgtacagtcattctgacaggaaatgcaggaggaagggaaggtaaccggcttcgttatgctgacaggaatacctgttatcatggaagtgcactcatgtggccgacgtagcttaagaggatggaagagtggagactgcagacagggggtattgaaaggtaaacatgtttcgcccgccagctgcaccgggggccagcatcactttttttacgttgtaacccggtatgcattccggctttgatgattacagtcagagggcagcagactgacgttatttaaccggacagaaaaattatggacactgaaatatcgtctgttaatacctcgtttgtcggtgtggtattccctgtattaccggcgtcaccgataaagagagttataaacgccagaaaggtacctcctttatgccggggaacacttacggaaaatgaagtctgaaaaggagcacaatgaaaagaggcgtgtcccgtaaatataacgaatcatcgcaggatatgcattatcaggtgataccagagggcattaaactgtcgccacggataagaatatacaacatttctgataacaaaacatcataacgtgtttcagatatgttccggcatcagtctgacggatattatttcccgggaaaacaaacctgctactgtgacggttaactgtatctgcataaattatttataatgaaagaacagtattacggattcaaatatcatcctgtttgcattcaggcggacattcccggatgccggaaagaatatcctgcaggctgagtgagtctcttccacagtgccgggatcgctgtcgccacgtacatattgtcaccaggatgggtatgtaccgcagcatgccatttctggtgaataaccgcacctgcacattcagtctgctgagaacctggcgtgcatcgggctgtaaagaacatccctgtccgtggctcctctggtggtgttgcctgctcagcaatgacaggatgcccttaagacgcccgtcatggctcagtatgatgacgacgaacacgctctgcaggtgagcatgcggggccgggagcatcatcatttccgtattttgtcacaccttccggaagcaaccggcatcagttgcggttatcgtcaaccgttgtgcggtatgccaggagcacgtactgatccatcagatccgtcagtgctgcgctctgcctctgacggttgatgatccattcctccagctctttttctgatttccgtttcaggttctctttccagtcttcaaggctgtttccggtcattaaatcaagccagcaaagccagaccagtttgaggcgcaactccgtgccaccaaactgacggaagaggctaatcagtttatttgccagagaacgctgcctcagacgttcacattcagacaggagaatgccttccagcatcggatgatgaaccagcagatgttcactggtgcataaattcactatcagatcatcatccaggggcggcgtggcccgtttgtcagggccataaatcagccggtgcaggctctggggtacgatggcaatctccggtttttcaccattgaatgacacccacccgggcgtcagattatggaagtagtagatattcggatgacacacgccccaggatacggcgtgccgggtgaagccggtcagccatttctggtagctttcgtggagcagttcgtaacgggtctgatactgttgtttcattttcatattcctcacgggggatataacaggcagcagaatgccgccggcaggccggggattacgtctgctgcgggtgaacggataacggtcagaaattacgggcggggctgtgcaatacgcgcctgtagccaggcttccacttcacttttcagccagcgggagctgcggcccagcttgatgggagccggaaaggccccatccctgatgagcctgtaaaaccacttatctgtcaggccgttcagttgagtgataaatgccatgtcgaccatctggtcatccatcagtgaaactggggtggtcatgagaatgttcctccggatgttgttaatctcaaccggcgttggtgatgaaaacaacgcaccaccttcaccggcataacaaccggggagaaacgtaaaaaataatcgggaatgtgaccgtcaggagataaacggggggattgcggtggctgagccgtaccggtatgtcgggtggttgttgcgaaacgatgcttccgcacgcgcacgcgataaaggagggaggactttcgtgagacaaggggaaaactagcgttctgataattgcagagttgtttttgaaggcggttgtggtatatcagcctgtgacctgtgggcaggcgacagttatcactggtgggataagactgtctgattggtattataaatatataagagagatcaaacacatgagatcaaatacatgagttcatatatgtgaaataaacactgtgagtgcgatcagtgggcatgagaacgcagtagcagcagattgcgttgtacccacagggctatctctgatagctggcgtataacctgcgtatataaaacgtacctgcaacacacgtgaacagagtgcattaagcatccgtctgagcggtaaacgtatccgacctggtgagtgacagtctgagagaccggttaagtggtggcacgggagtaatgagtttggggagggtaccagaatgccaggctggtgcggtatgctgacagcatcctgttaaccgcagcataaagtaatgagaggctaatggaagttaaaaccacagcagttccgtcgttgttcatcccgggagacgctggaaaaagtgatttcccacacgcgttataaacttacccctgcggagctggaagcctttaactctgccgttgacaaccggctggcagaactgacaatgaacaaactttacgatcgcgtgccggcttccgtctggaaatatgtcacctgaatcttgaatccgcgctacgatgactccggtgttatctgtgcaccggaagatcgggaacattaagcagtataacggcaacaaagaattcgaaatcaaaagggaatggtgtacagaggggcaggcgttcaggcattaccggcctgtatcttctgaaggggactcgtatttgtcggggctgagtattccgctcgattcgatcacggattggcggaatacctgactgtgattgattcaggtaccattttgcagggagccggtgcgttactgtctggcacaacaaacgcagcgggtcgctctgccccgccgattcctgataatccctcccctgtaacctactgcaacagtacaaatacactgacgcctgaaacggtaaccagaatcagcaccagcagtaacgtcagtaaacagagcagacgatcggtcttccggtaataaccgaaggggtcgacagcgccacaatacgggcaacaaactgtattatgagtaattgcgttaccacagtccctgcacttctttttgcgtatcacgatagctccctcgccacgccttatccgtaaccggttttttacattaaaaaaaacaacgccgggaattcaatcgtcagtccggagacgaccgttcgggttatcacagagtgcctgagacagtgtcctgccggaggtcacttcagggactctgcgtattttttacgacgtggctattccgtatgaaccatacggagatttaaccatgacctacaaatacaaccccttctggcagcaacgtattcgtgagacggtgcggcacgcactgaatgttcatccccgcctgacggcattgcgggttgacctgcgtttcccggatgtaccggcagcaacggacgcagctgtgatatcccgcttcatcaatgccctgaaagcccgaatcgacgcttaccagaaacgtaagcatcgggaaggtaaacgcgtgcatcccacaaccctgcattacgtctgggcccgggagtttggggagtgcaaaggtaaaaaacactatcacctgatgctgctggttaaccgggatacctggtgtcgtgccggtgattaccgtgctccgggatcactggccgggatgattaaacaggcgtggtgcagtgccctgggagtggatgtcgggtgccatgccacgctggtgcattttccggcctggccggcggtgtggctggaacgcgatgatgacactggctttcagcaggtgctggaacgtgctgactatctggcgaaggaacataccaaagctcactgcaccggtgagcgcaattttggctgtagccggagttgagcacgactggcgcgccaatacccggcaaaccaaaagtatgggttgttgtctggcggcaacgatgtatccactcgcccactgactgttttttacgtcagtgttccattgtgtgacaaccacagtgctgtaacagcaaccagcctgctttacccaaactccagtccagattttaactgaaccgccattcacaccctgaccacgctgcccgtaccgggacggctgttgcctgcgtgtcgtctggcggctgaggaatatgactatgtacgcaaaatcctttatcgctcttgatggcaacggacgtctgacgggcgcccgtactgcacaggccgcaccttatgctcactacacctgccacttgtgtggcagtgcactcagataccatccgcaatacgacactgaacttccctggtttgaacacactgacgacaggctgacagagcacggtcaacagtgcccttatgtcaggccggagcgcagagaaatacagttgattaaacgtctgcagcaattcgtaccggatgccttacccgtggtgcgtaaagccagctggcactgcagacaatgtcaccacgattattatggggagcagtactgcacacactgccagaccggaggattcagtattccccggacaactcaggaggaaatatgcgaattctgaactgttatatggcgaatgacagcaaaggccattttgttacggcgaaagaagctgcgaagcacaaccgacaggacgttttgtgctgtgtgtcctgtggatgcccgttaacacttcagcggggcaatgacggacaaccaccgtggtttgaacatgaccagatgactgtcgctgaaaaaatcctgctgcgatgtacctggcttgacccggcagagaaagaggcccgtcgtttgcatctgcagggcatgacggttccggattatacggtgaaggtgagaaagtggttttgtgtgatgtgtgacgaagattatgagggggaaaagtgctgcccacgctgcggtaccggggtatacagcagggcgtgggggcggcaggaggtgccgtcggaagatgccagggctgataatccgttacagaggctgtaatggttgcctccggagcagtttgcggtgatgcctttcccgggaatggattgccagtgcggggactgtggagcttaattccggtgttggtggcctttccattgattttatgccaacagccccctgtgactgacaggctgcctcgtcattccattcgtatctccagtaacagggggttgtattgtattttattgtaccggttcaggtgtgcgtttcccggcgcgtctgcaccggcttaaccaaattcaacagggataaaatagtggtaagcgtacagcctgaaccgtctggtcagaatctgacgaattagacaaagtggtgtccaccaaataagtagtgggaaccaaagtgtcagatatgcagaaaaatgtgactcccggcaggcgaaaaggctgccctaattatcctcccgaatttaaacagctgctcgttgctgcctcctgtgaacccgggatatccatctcaaaacttgctcttgaaaatggcattaacgccaatctgttgttcaaatggcgacaacaatggcgcgagggaaagctgctattaccttcttcagagagcccccagctacttcctgtgactctcgatgcagctgccgaacagccagaatcgctcgcagaggacccggaaaccctcagtatcagctgtgaggtaacgttccggcacgggacgctccgcttcaatggcaatgtcagcgaaaagctcctgactctgctgatacaggaactgaagcgatgatcccgttaccttccgggaccaaaatttggctggttgccggtatcaccgatatgagaaatggcttcaacggcctggctgcgaaagtacaaacggcgctgaaagacgatcccatgtccggccatgttttcattttccggggccgcagcggcagtcaggttaaactgctgtggtccaccggtgacggactgtgcctcctgaccaaacggctggagcgtgggcgcttcgcctggccgtcagcccgtgatggcaaagtgttccttacgcaggcgcagctggcgatgctgctggaaggtatcgactggcgacagcccaagcggctgctgacctccctgaccatgctgtaaatctctttatcctggttgtcacagaataagcccggtaaaatacgggcttatgaacgacatctcttctgacgacatcttcctgctaaaacagcgcctggccgaacaggaagcgctgatccacgccctgcaggaaaagctgagcaaccgggagcgcgaaatagaccatctgcaggcgcagctggataaactccgccggatgaacttcggcagtcgttccgaaaaagtctcccgccgtatcgcacaaatggaagccgatctgaaccggcttcagaaagagagcgatacgctgactggtagggtgtatgacccggcagtacagcgtccgttgcgtcagacccgcacccgtaagccgttccctgaatcactaccccgtgacgaaaagcgactgttgcctgcggcgccgtgctgcccgaactgcggcggttcactgagctatctgggcgaggataccgccgaacagctggagttgatgcgtagcgccttccgggttatccggacggtacgggaaaaacatgcctgtactcagtgcgatgccatcgtgcaggcacctgcaccttcgcggcccatcgagcggggtatcgccggaccggggctgctggcccgcgtgctgacctcgaagtatgcagagcacnccccgctgtattgccagtcanaaatatacggccggcaaggtgtggagctgagccgttcactgctgtcgggctgggtggatgcatgctgccggctgctgtctccgctggaagaggcgcttcatggctatgtcatgactgacggcaaactccatgccgatgataccccggtccaggtactgctgccgggtaanaanaagacgaagaccgggcggttgngggcgtatgttcgtgatgaccgcaatgccgggtcagcgttggcacctgcagtgtggttcgcttacagcccggacanaaaaggcatccatccgcagactcatcttgcttgcttcagcggtgtgctgcaagcggatgcgtacgccgggttcaacgagctgtatcgcaatggngggataacggaagctgcctgctgggctcatgcccgccgaaagatccacgatgtgcacgtccgcatcccgtcagcactgacggaagaagccctagagcagatcggtcagttgtacgccatagnggcggatataaggggaatgccggcagagcagcggcttgctgaacgtcagcgaaaaacgaaaccgctgttgaaatccctggaaagctggttgcgtnaaaagatgaagaccctnttnttcggctctggccatggnggngngnggggagcgctactgtacagcctgatcgggacgtgcaaactgaatgacgtggatccanaaagctaccttcgccatgtgcctggcgtcatagcagactggccggtcaaccgggtcagcgaactgcttccgnggcgcatagcactgccagctgaanaacacanccccgtcaatacgnccctcgctgtacgcttttttgttcggactgcttatggcctttttccactggtgtagcaggaaagttaaccggctgccaccatgagatgacgtgtaaaccgtgcaggcatgttttcacgtggtgacgctttcattgggggtctacgccggaaccccaatattgttcacatacatgaatttgaaaaactaagcgatactgctgtccgtaccttataaacttatttcaacgcttccggcagcgtcacaatccacagttcactgtcagactccggtttctccagtggcttcactctgagggtcgtttcaacctgcttgtcgtcaagcgtcagctttccttccgcgttcacccgataatccttgaatgtcttgccctcgaccggatgttgcatcgccaccttcacgccaaagtcgttatcgttcgccaccgccagcgttttgctgtcgatcagcgccaacccttcagccttctcctgctgccagcccaaggagcgcagatcaacaacctgcgttttctgcgcaagggtaatgccgcgctgtgacagggttttctcatcatcaaactccggatactcacccggcttgtcgaagcctgacaggtcgctcgccttattgagatcgacctcgtaaatcaggttacgcattctgttgtttttatctcttccctgttcgatcagcaggatgtgctggttatcgagcgccacgatgtctccgattttagcgtcgctgtttttgctgtaggccgcgctgtcgataggataaccgtacatcgcggtttttccgcttgccggatcgaagctcaccagacgcgtaaacagcgcctttttcttgctcttagcgtcgatatccagcgtactttgcacggcgacaataatacgcccgtccggcatacgggtgaggccttcaaagccgcggttcgcctgacgccatttgaggatatttggcaaaccgcccgcaatcgctttttccccttccgccgcctgcggaccgtggattgccaggattttccctttactgtcgatgttaatcaggaacgggccatactcatcgcacagccagtaacctcctttaccatccggagtgatcccttccgtatccagcccgcgattatcccccttcagtctatgtaacgtgtcgctgaaggccacttcattggtggagccaatcacgtcgcttgccagcggcagaccgttgatcgcgcctttatcgtcatgcagaggacggggatcgatggcctccgctttgccgttttgtacacgaatcgtcatcagcagcggcgcgaaatctggcgtaacgaaaattttagtttcgtttttcccctctttcggtgaatccgcgttcggaccgcgatcggtaatggttgcgaatgtcagggcatcgccctgtttaccggtgaacagcaggccagaacctatcccaaccggaaggccgttcgggaatgcactggcaaatgcgccggcgtagttcacgtgcgtgccttctggaaaactgacgacatagcgctcagccgtaggttgtgccgccagggcagagaaagagagcgtacaaccgattagcacgggaataatttttcttttcatattgttagcatccataaagtgaagatcacactacaccataaagaagaaacgagtcaggaaaatgacatcgaatggcaacatgcgcgggcctgaggccaaagaaatgtaaaacactgttgttatttgtaacaacggaaacatttacggaaattatttgtctttcttcgtgatcaaaaatgctgtgtcttgttggattggagtgatgagggctgcgtttaggaaacgccctatattgtacggttgcattatcgcggtaggggtaatgcacgtgtcagtatgatgagctgaccacactcacgtgggtggactggtataacaatcgacgattgctggaaaggcagggccatatcccaccggcagaagcagaaaaagcttattatgcttccatcggaaacgatgatctggcagcctgagttcacagataaaacactctccaggaaacccggggcggttcacttagccgcgtgtccattattgctggataagatcacactttaaaatgccctatatagggttaaccagtaattatctgtatgatagctttgagttcgggaggaggtaatgactccaacttactgatagtgttttatgttcagataatgcccgatgaccttgtcatgcagctccaccgattttgagaacgacagtaacttccgtcccagccttgccagatgttgtctcagattcagattatgtcgctcaatgcgctgagtgtaacgcttgctgataacgtgcagctttctcttcaggcgtgattcatacagcggccagccatccgtcatctataccacgacctcaaaggccgacagcaggctcagaagacgctccagtgtggccagagtgcgttcaccgaagacgtgcgccacaaccgtcctccgtatcctgtcatacgcgtaaaacagccagcgctgacgtgatttagcaccgacgtagccccactgttcgtccatttcagcgcagacaatcacatcactgcccggttgtatgcgcgaggttaccgactacggcctgagttttttaagtgacgtaaaaccgtgttgaggccaacgcccataatgcgtgcactggcgcgacatccgacgccattcatggccatatcaatgattttctggtgcgtaccgggctgagaggcggtgtaagtgaactgtagttgccatgttttacggcaatgagagcagagatagcgctgatgtccggcagtgcttttgccgttacgcaccacgccttcagtagcggagcaggaaggacatctgatggaaatggaagccacgcaagcaccttaaaatcaccatcatacactaaatcagtaagttggcagcattaccgaaatccccatcctttagggcagtgaggatgtcaataatagcagaccacatcatgagtcattctgaccgacacatgccagaagcagaggctccatcccattttatacctaccttataacacttagaaaaacaacatgttaaaaatgtctattggaaacaattttatttccaattgtaatgataaccattctcatattaatatgactacgtgataattaacttttgatgcactccgcatgtctgaccgcgccactaccacagcttccttaacgttcgagtcgctttatggcacacatcacggctggttgaaaagctggctgacgcgcaaactccagtctgcttttgatgcagatgacattgcccaggacacttttttgcgggtaatggtcagcgaaacgctctcgacgatccgcgatcctcgctccttcctctgcactatcgccaaacgcgtgatggtggacctgtttcgccgaaacgcgctggaaaaagcgtatctggagatgctggcgcttatgccggaggggggagcgccttcacctgaggaacgcgaaagccaactcgagaccctacaactcctcgacagcatgctggacgggctaaacggcaaaacacgtgaagcgtttctgctttcgcaactggatggtctgacatacagcgagattgcgcacaaactcggtgtttccatcagctccgtgaaaaaatacgtggcgaaagccgtcgagcactgcctgctgttccgtctggagtatgggttatgaatcctttgttaaccgattcccgccgtcaggcgctgcgttcagcttcccactggtatgccgtgctaagcggcgagcgcgtcagcccacaacaggaagcgcgctggcaacagtggtatgaacaggatcaggataaccagtgggcctggcagcaggttgaaaacctgcgcaaccagcttggcggtgtgcctggcgacgttgccagccgggcgttgcacgatacccgcctcacccgccgtcacgtgatgaaaggattactgctgttgctcggcgctggcggaggctggcagctctggcagtcggaaaccggcgaaggtctgcgggcagattaccgcaccgccaaaggcacagtcagccgtcagcaactggaagatggctccctgctcacgctgaatacccaaagcgcggcggatgtgcgttttgatgcgcatcagcgcaccgtccggctctggtacggtgaaatcgccattactaccgcgaaagatgccctgcaacgccccttccgtgtcctgacccgtcagggccagctcactgctttagggacagaatttaccgtccgccagcaggataatttcacgcagcttgacgttcagcagcacgctgtggaagtgcttctcgccagtgcccccgcgcaaaaacgcatcgtgaacgctggtgaaagcctgcagttcagcgcctctgagtttggcgcagtgaaaccgctggatgacgagagtacaagctggacgaaggacatcctgagcttcagcgataaaccactgggtgaggtgatagccacgctaacccgttaccgcaacggcgtgctgcgctgcgatcccgccgttgccgggctgcgcctgagcgggacgttcccgctgaaaaataccgatgcgatcctgaacgttatcgcgcaaacgcttcccgttaaaattcagtctattacgcggtactggataaacatttcaccactgtaaggaaaataattcttatttcgattgtcctttttacccttctcgttcgactcatagctgaacacaacaaaaatgatgatggggaaggtatgacgccgttacgcgtttttcgtaaaacaacacctttggttaacgccattcgcctgagcctgctgccgctggccggtctctcgttttccgcttttgctgcacaggttaatatcgcaccgggatcgctcgataaagcgctcaatcagtatgccgcacacagcggatttaccctctcggttgacgccagcctgacgcgcggcaagcagagcaacggcctgcacggcgattacgacgtcgagagcggcctgcaacaactgctggacggcagcggactgcaggtaaaaccgctgggaaataatagctggacgctggagcccgcgcccgcaccaaaagaagatgccctgaccgtggtcggcgactggctgggtgatgcgcgtgaaaacgacgtatttgaacatgctggcgcgcgtgacgtgatccgccgtgaggatttcgccaaaaccggcgcaaccaccatgcgtgaggtacttaaccgcatccctggcgtcagcgcgccggaaaacaacggcaccggcagccacgacctggcgatgaactttggcatccggggcctgaacccgcgcctcaccagccgctcgaccgtcctgatggacggcatccccgtccccttcgccccttacggtcagccgcagctttcactggctcccgtttcgctcggcaacatggatgccattgacgtggtacgcggtggtggtgcggtgcgttacggaccgcagagcgtgggcggcgtggtgaactttgttacccgtgccattccgcaggactttggtatcgaggcgggcgtggaaggtcagctcagcccaacctcttcacaaaacaacccgaaagagacgcacaacctgatggtgggcggcacagcggacaacggttttggcaccgcgctgctctactccggcacgcgcggcagtgactggcgcgagcacagcgccacccgcatcgacgacctgatgctgaaaagcaaatatgcgccggatgaggtgcacaccttcaacagcctgctgcaatattacgacggtgaagccgacatgcccggtggcctgtctcgcgcggattacgacgccgatcgctggcaatccacccgcccgtatgaccgcttctggggtcgtcgcaagctggcgagcctgggctaccagttccagccagacagccagcataaattcaacattcaggggttctacacccaaaccctgcgcagcggctacctggagcaaggcaaacgcatcaccctctcgccgcgtaactactgggtgcgcggtattgagccacgctacagccagatctttatgatcggcccttccgcgcacgaagtgggcgtgggctatcgctatgtgaatgaatcaacgcatgaaatgcgttactacaccgccaccagcagcgggcagttgccgtccggctcaagcccttacgaccgcgatacgcgttccggcaccgaggcgcacgcctggtatctggatgacaaaatcgacatcggcaactggaccatcacgccgggtatgcgtttcgaacatatcgagtcataccagaacaacgccatcacaggcacgcacgaagaagtgagctataacgcaccgcttccggcgttgaacgtgctctatcacctgactgacagctggaatctttatgcaaacactgaaggctcgttcggcaccgtacagtacagccagattggcaaggctgtgcaaagcggcaatgtggaaccggaaaaagcgcgaacctgggaactcggtacccgctacgacgacggcgcgctgacggcggaaatggggctgttcctgattaactttaacaatcagtacgactccaaccagaccaacgacaccgtcactgcacgtggcaaaacgcgccataccgggctggaaacgcaggcacgttacgatctgggtacgctaacgccaacgcttgataacgtttccatctacgccagctatgcgtatgtgaacgcggaaatccgcgagaaaggcgacacctacggcaatctggtaccattctccccgaaacataaaggcacgctgggcgtggactacaagccaggaaactggacgttcaatctgaacagcgatttccagtccagccagtttgcggataacgccaatacggtgaaagagagcgccgacggcagtaccggccgcattcccggcttcatgctctggggcgcacgcgtggcgtatgactttggcccgcagatggcagatctgaacctggcattcggtgtgaaaaacatcttcgaccaggactacttcatccgctcttatgacgacaacaacaaaggcatctatgcaggccagccgcgcacgctgtatatgcaggggtcgttgaagttctgatgtgttaacgcccggcttgccgggcttttagctggaatgtgattatgttggcatttatccgttttatttttgcaggcctgctgctggtgatcagccacgcctttgccgccacggttcaggacgaacacggcacgtttacactcgaaaaaacgccacaacggattgtggtgctggaactctcgttcgccgatgcgctggccgccgtggacgtcagcccgatcggtattgccgacgataacgatgcaaaacgcatcctgcccgaagtgcgtgcgcacctgaaaccgtggcagtccgtcggaacgcgcgcgcagccgagcctggaagccattgccgctctgaaaccagacctgatcattgccgacagcagtcgccatgcgggggtttacatcgccttgcagcaaatcgcgccggtactgctgcttaagtcccgcaacgaaacctacgctgaaaatttgcaatctgcggctatcatcggcgaaatggtgggtaaaaagcgagagatgcaggcacgcctggaacaacataaagagaggatggcgcagtgggccagccagcttcccaaagggacacgcgtggcctttggcacatcacgcgaacagcaattcaacctgcatactcaggagacctggaccggcagcgtgctggcctctctggggctgaacgttcccgctgcgatggcgggtgcgtccatgccgtccatcggcctggagcaactgctggcggtcaatcctgcctggctgctggttgcccactatcgcgaagagagcattgttaaacgctggcaacaagatccgctctggcagatgttaaccgccgcgcagaagcagcaggttgcttcggtcgacagtaacacctgggcgcggatgcgcggtatttttgctgcagagcgtattgccgctgacacggtaaaaatcttccaccatcagccgcttaccgttgtgaaatgaccgcgataaaacacccggtgctgctgtgggggcttcccgttgcagcacttattattattttctggctgagtctgttttgctactcggccattcctgtttccggagcagatgcaacccgcgccctgctgcctggacacacgccaacgctaccagaagcgctggtgcaaaaccttcgtttgccacgaagcctggtcgccgttctgatcggcgcaagcctggcgctcgcgggcacgctgctgcaaaccctgacccacaacccaatggcctctccttcactgctcggcattaacagcggcgcggcgctggctatggcgcttaccagcgcgctgagtccgacgccgattgcaggctattctctgtcgttcatcgcggcatgcgggggcggcgtgagctggctgctggtcatgaccgcaggaggcggatttcgtcatacccatgacagaaacaaactgatcctcgcgggtatcgcgctgtcggccttttgtatgggccttacccgcatcaccctgctgctggccgaagatcatgcttacggcatcttttactggctggcaggcggagtgtcccacgcccgctggcaggatgtctggcagctcttgccggtggtggtcactgcagtccctgtcgtgttgctgctggcgaatcaactgaacctgctcaacctcagcgacagcaccgcccatacgctgggagtgaacctgacgaggctacgtttggtcatcaatatgttagtgctgcttctggttggtgcgtgcgtcagcgtggcaggtccggtggcgtttatcggtctgctggtgccacatctggcgcgcttctgggcaggcttcgatcagcgcaacgtactgccagtgagcatgctgctgggggccacgctgatgctgctggcagatgtactcgcacgcgcactggccttccccggagatctgcccgcaggcgcagtgctggcgctgattggcagcccttgctttgtctggcttgtgaggaggcgaggatgaaaattgcgctggttattttcatcacccttgccctggcgggctgtgcgctgttatcactccatatgggagtgatccccgtgccgtggcgcgcgctgctgaccgactggcaggccggacgcgagcattattatgtattgatggagtaccgactgccgcgcttgctgctggcactgtttgtcggtgcagccctcgccgtggcgggcgtgctgatacaggggattgtgcgcaaccctctggcatcaccggatattctcggtgttaaccatgccgccagcctggcctctgtgggggctctacttcttatgccgtcactgcccgtgatggtgctgccgctgctggcctttgcgggcggcatggcggggttgatattgctgaagatgctggcaaagacccaccagccgatgaagctggcgctcaccggcgtggcgctttctgcatgctgggccagcctgacggattatctgatgctctcgcgcccgcaggatgtgaacaacgccctgctgtggctgaccggcagcttatggggccgtgactggagctttgtgaagattgccatcccgctgatgattttatttctgccgctgagcctgagtttttgccgcgatctcgacctccttgcactcggcgatgcgcgcgccaccacgctcggtgtgtcggtgccccatacccgattctgggctttgttactagctgtcgccatgacatctaccggcgtggccgcctgcggcccgattagctttattggtctcgtggtgccgcatatgatgcgtagcatcaccggtggacgtcaccgcagactgctgcctgtttcggccctgacaggtgcgttgctgttggtggttgccgatctgctggcgagaattattcatcccccactggagctcccggttggcgtgctgaccgccattatcggtgcgccgtggtttgtctggttgcttgtgagaatgcgataaatgactttacgaactgaaaatctgacggtcagttacgggacagacaaggtacttaacgacgtttcactctcactgccaacggggaagatcaccgccctgatcggtcctaacggttgcgggaaatcgacgctgttaaactgtttttcgcggcttttaatgccgcagtctggcaccgtatttctcggcgataatcccataaatatgctctcatcgcgccagttggcccgcaggctttcgctgctgcctcagcaccatttaacgccagaggggatcacagtccaggagctggtttcgtatggtcgtaatccctggctgtcactctgggggcgtctctccgctgaagacaatgcacgagttaatgtcgccatgaaccagacccggatcaatcatcttgccgttcgtcggttaaccgagctttccggcggtcagcgccagcgcgcatttctggcaatggtcctggcccagaatacgcccgttgtattacttgatgagccaaccacctatcttgatatcaatcaccaggtggacctgatgcggttgatgggcgaactccggactcaggggaaaacggtggtcgctgtgctgcacgaccttaatcaggctagccggtactgcgatcaactggtggtaatggcaaacggacatgttatggcgcaaggcacaccagaagaggtgatgaccccaggattgctgagaacagtattcagcgtggaagcggaaatacaccccgagccggtatctggcaggccgatgtgcctaatgaggtagattgcacaggccgtaagaaccaaaccacgactgaatgaaactggactggcgccagcaagcctgttcagactggggctgaacttttccggactctgaaagattaccaatactcatcgtccatccgcttgctttaggctgacaggttcataatcaacgcaaaccagagctgtacaggcttgggcgcggctttcaaaccagtcgtgatcacggcaatcaattttgaactctgcttaacggacatttctgtataacccttacggcaacgaaaaacgcgaagttaaaattttagaaacccaaaaacgtgacatgactaagtttagatttcagggggggagatcaaaaaatttcgctctgtgccagagcggacattcacggagctggttcattaccaatgaggttgggcttttgaggataaatcaatgatcagacgccaacgtaaatcaaaagcaaccctggaacggaattgctaatccagtttctgaccatcgatttttctaaaaagtgtgcgtttgctactacttaggtaggtgcagctttcttaatcaccggcagccacgttatacaggccagttgatggatcgattgttatcaatgatatctttatgagtcggtgtctcacccagcttaccgaagctggcataaagtgaaggcagacgggcccgtccttctccctttttcgccagagggaaagcgcgaagcatggtggcagcctcccagtcacaacaataggatggtgtgcacggctgctgacgccatgattcagcgatagagccggaaaatacggggtcaaagccggtatcattaaccagagtcatcgtgacctgtactgcggctggatgatctcctgctactgcaactgctaggcgaccgcggctcccttcaggtagtctgttgtggtcaactaaaactggcctccgcgttagagtttttccagtatcggttttctgattcgtttggtggtaacccaccattatattcgtgcggtcttagtgcgctgtaatatccaacgatatagtccgttattgcgtgagctgcatcgctgaagcttacatagcccgtcgctggcacccattcgttcttcagactcctgaagaagcgctccattgggctgttatcccagcagtttccacgccgactcatactctgcctgatccggtatcgccacagtaactgccggaactgcctgctcgtataatgactgccttgatcgcctggaacatcaccccgacgggcttaccacgggtttcccatgccatttccagtgctttcatggtaagcctgctgtccggcgagaacgacatggcccagcccactggttttcttgcgaacaggtcgagaacaacggcgaggtacgcccagcgcttacccgtccagatataggtcacatcaccgcaccacacctgatttggttccgttacggcgaactgtcgctcaagatgattcgggatagcaacgtgctcatgaccgccacgcttataccggtgagtcggctgctggcaactgaccagccccagctctttcatgagtctgccagcaagccagtgccccatctggtagcctctccgggttgccattgtggcgatgcttcttgctccggcagagccgtggctgatgccatgcagttcaagtacctggctgcgtaatacagcccgtctgccgtctggtttttcaggacggtttttccagtatctgtagctgctgcgatgaaccccgaacacatggcagagtgtgaccacaggataatgcgctctgagtttcctgattatcgagaactgttcagggagtctgacatnaananngcnnntgtagattcaattggtcaacgcaacagttatgtgaaaacatggggttgcggaggttttttgaatgagacgaacatttacagcagaggaaaaagcctctgtttttgaactatggaagaacggaacaggcttcagtgaaatagcgaatatcctgggttcaaaacccggaacgatcttcactatgttaagggatactggcggcataaaaccccatgagcntaagcgggctgtagctcanctgacactgtctgagcgcgaggagatacgagctggtttgtcagccaaaatgagcattcgtgcgatagctactgcgctgaatcgcagtccttcgacgatctcacgtgaagttcagcgtaatcggggcagacgctattacaaagctgttgatgctaataaccgagccaacagaatggcgaaaaggccaaaaccgtgcttactggatcaaaatttaccattgcgaaagcttgttctggaaaagctggagatgaaatggtctccagagcaaatatcaggatggttaaggcgaacaaaaccacgtcaaaaaacgctgcgaatatcacctgagacaatttataaaacgctgtactttcgtagccgtgaagcgctacaccacctgaatatacagcatctgcgacggtcgcatagccttcgccatggcaggcgtcatacccncaaaggngaaannggtacgattaananagngaacggaannccaattcncgaacgttcccnaaannnnnnnaanannnnnnnnnngggnnntnggnnggnnnnttnnnnnnnngnnnnaaaaannnnnnnnnnnncnnnncttgtagaccgaaaatcacgttatacgatcatccttagactcaggggcaaagattctgtctcagtaaatcaggctcttaccgacaaattcctgagtttaccgtcagaactcagaaaatcactgacatgggacagaggaatggaactggccagacatctagaatttactgtcagcaccggcgttaaagtttacttctgcgatcctcagagtccttggcagcggggaacaaatgagaacacaaatgggctaattcggcagtactttcctaaaaagacatgtcttgcccaatatactcaacatgaactagatctggttgctgctcagctaaacaacagaccgagaaagacactgtgaagtggtcaacaaaaactggccaccgagttagagttttttccagtatcgattttccgattcgtttggtggtaacccaccattatattcgtgcggtcttagtgcgctgtaatatccaacgatatagtccgttattgcgtgagctgcatcgctgaagcttacatagcccgtcgccggcacccattcgttcttcagactcctgaagaagcgctccattgggctgttatcccagcagtttccacgccgactcatactctgcctgatccggtatctccacagtaactgccggaactgcctgctcgtataatgactgccttgatcgctgtggaacatcaccccgacgggcttaccacgggtttcccatgccatttccagtgctttcatggtaagcctgctgtccggcgagaacgacatggcccagcccactggttttcttgcgaacaggtcgagaacaacggcgaggtacgcccagcgcttacccgtccagatataggtcacatcaccgcaccacacctgatttggctcggtcacggcgaactgccgttcaaggtagttagggatagcaacatgttcatgaccaccacgtttataccggtaagtcggctgctgacagctgaccagccccagctctttcatgagtctgccagcaagccagcgccccatctggtagcctctctgggttgccattgtggcgatgcttcttgctccggcagagccgtggctgatgccatgcagttcaagtacctggctgcgtaatacagcccgtctgccgtctggcttttcaggacggtttttccagtatttgtagctgctgcgatggaccccgaacacatggcagagagtggccacaggataacgcgccctgagtttcccgattatcgagaactgttcagggagtctgacatcaagagcgcggtagccttttttaatatttcattttccatttcaatacgttgtagctttttcctgagctcacggatttcaatttgttccggggtaataggggaggcttttggtgtttttccctgccgctcatcacgtaattgtttcacccatcgcgtcattgtggaaaggccgacatccatagcgctggctgcatctgccacggtgtaattctggtcaacgaccagttgagcggattcgcgtttaaactctgcgctgaaatttctttttttcattatggcacctgtgttgttctgaggtgagcatatcacctctgttcaggtggccaaattcagtaaaccacttcactgaagttcaaaacaccgaaagagataattgaaaggggtgttgcattgacagattgaatctacaaccgcgtattttgcacaggagtcgctgaaaaatacgcgttaatcgaacaatggcgacaacaatttcccattgangngannnntcaggtntttgnnntnncnngnnnngnttntnnnannnggnnnnnnnnnnanccnnnnnnnnnaaannaannnnnnnnnngnnnaaannngnnnntnangnngnnnnnnnncnnnnnnnnnnaannnnnngnanccngnngnnncnnnnngnnnnngnnnnnnanngnnnnnnnnntngnnnnnnncnnnnngnnnnnnntnnnnangnnnnnangnnnnnnnnnnannnnnaannnnanntnnnnnnnnnnnnnnannnnnannnnnannnnncnnntnnnncnaannnnnnnnannnnnnnntnnnnncnnnnnnnnnnaannnngnnnnggnngnngnncnnnnnnnnnnnnncnnnnnnnnnggnnnnnnnnnncnnnnnngnnnnnaannnnnttnnnnnnnnnnaannnnnnnnnnnnncnnnggnnnnnnnnnnnnnaaannnnnnnnnnnnnaannccnnnttnnngnnnnnnnnnnnnnnnnnccnncnnnnnngnnnnnncnnnnnnnnnnnnnnngnnnnnnnnnnnnnnnnnnnnnnnnncnngnnnnnnnnnnnnnnnnnnnnnnnnaaannnnnnnnnnnnnnnannnnnnnnnnnnnnnnnnnnnnnnnnnnnnnannnnnnnngnnnnnnnnnaaaannnnnnnnnnnnnnnnnnnnnnttnnnnnnnnngnnnnnnnnnnnnnnnnnnnnnnngnnnnnnnnnnnnnnttnnnnnnnnnnnnnnnnnnnnnnnnnnnnnnnnggnnnnnnnnnccnnnnnnnnnnnnnnnnaaannnnnnnnnnnnnnnnnnnnnaaaaannnnnnannnnnnnnnnnnnnnnnnnnnnnnnnnnnnnnnnnnnnnnnnnnnnnnnnnnnnnnnnnnnnnnnnnnnnnnnnngnnnnnnnnnnnnnnnnnnnnnnnnnnnnnnnnnnnnnnnnnnnnnntnnnnnnnnnnnnnnnnaaaannnnnnnnnnnnnnnnnncnnnnnnnnnnnnnnnnnnnnnnnnnnnnnnnnnnncnnnnnnnnaannnnnnnnnnnnnnnnnnnnnnnnnnnnnnnnnnnnnnnnnnnnnnnnnnnnnnnncnnnnnnnnnnnnnnnnnnnnnnnnnnnnannnnnnnnnnnnnnnnnnnnnnnnnnnnnnnnnnnnnnnnnannnnnnnnnnnnnnnnnnnnnnnnaaannnnnnnnnnnnnnnannnnnnnnnnnnnnnnnnnnnnnnnnnnnnnnnnnnnnnnnnnnnnnnnnnannnnnnnnnnnnnnnnnnnnnnnnnnnnnnnnnnnnnnnnnnnnnnnnnnnnnnnnnnnnnnnnnnnnnnnnnnnnnnnnnnnnnnnnnnnnnnnnnnnnnnnnnnnnnnnnnnnnnnnnnnnnnnnnnnnccnnnnnnnnnnnnnnnnnnnnnnnnnnnnnnnnnnnnnnnnnnnnnnnnnnnnnnnnnnnggaaaattcccgatactttggactattactcctgaacaactgtaagcgtacagcctgaaccgtctggtcagaatctgacgaattagacaaagtggtgtccaccaaataagtagtgggaaccaaagtgtcagatatgcagaaaaatgtgactcccggcaggcgaaaaggctgccctaattatcctcccgaatttaaacagcagctcgttgggggatgcggacgatttcctggactctcaggagataaaacatgtttactgaagaagaaaaaatccgcgccattgagctttatttcaaatatggtaagaagctggctcccgtcgtacgcgaactgggctacccttcgaaaagaaatctgcggcgttggatccgctcatgggaagcaggtggtggcgcaaaagaatccattcgtcataagcaccgttactccgatgagcaaaaacaggttgccgttgaacattatcttaaccacggctgctgcctggcgtttaccagcagagccctgggttatccctgcactgatgtactcgctcgctgggttaatgaactttatcccgacagacgacgtatatttaccagtaaggccaacccggttgcgccctttgaaccagaagtcaaacgtcaggctgtcatggcactctgtacacgacaagtatcagccagtgagatcgccaggcgtattggtgtcagtcgtgcggtattgtataaatagaaagatgaaattatcggcaacagtgcttaccagactatgcgtaaacataacgaaccttccctggaggcagaacgcgatgcgttgcgggaggaagtcgcccgactgaatcaggaaatacgccgccggcagatggagctggatattctgaaaaaggcggaggaaatcataaaaaaagacccgggcatcagtatcagtcacctgaacaacagagaaaaaacaaagatcgctgatgccctgaggcaaacatatcccctgacagaattacttcatgttctgggccttacccgtagcagttatttttatcaccgggctgcactgaaagccggtgataaatacgccacgatacgtacgatgctgacagatatatttaacagtaattaccagtgttatggctatcgtcgcctgcatgcgatgctcaggcatgagggggggcggctatcagaaaaggttgtacgcagacttatggtggaggaacagcttgtcgtcagccgtaaccgtcgtcgtcgctacagctcatattgcggagaaatcggaccggctccggataaccttatcgccagagattttaaggcgtagcaacctaatcagaaatggctgacagatatcacggagttccaactccctgcaggtaaagtctggctgtcaccggtggtggactgcttcgatggaaaagttattagctggtctctcagtacacgccccgatgctgagctggtcaacactatgctggatagcgctgtcgaaacgttaaatgctggcgaacgaccggtgatacacagtgacagaggtgggcattatcgctggccaggctggctggaaagagtgaatgcagcaggtcttattcgctcaatgtcccgtaaaggatgttcacctgataatgccgcatgcgaaggttttttcggcagactgaaaacggaaatgtattatgggcgtaaatggtcgggcatcacgccagaaaagttcatgcagcatgtagatgcttacatcagatggtataacgagcggcgtataaaattatcgctgggtgcagtcagccctgaaatgtaccgccaacaatgtgggctggcataataaagcagtctaggaaatcgtccgcatccccaattcaggggcggttttttctttacggtttttcgccataaagactattactatcagactgacaagactacccgcgaaagccgggagttccgcgccaagattaacagccaccagatactggggaattaatgtactgacaccacacatcagggtaattagtccaacgcctcgtatagtcttcataccaccaccgataatcgcgacgatgacgaaaggaagcagaatgttgaacagtgccagttgaagaataattgtcccgctgagtgtggttacaggtaaattaacttgttcagcaagtacagagacaggtatacctactgccccaaacgctgtagggactgtattagcaaccagtgatgcaatcgctgcttttagtgggttaaagcccagagcaatcagtataccaatggggattgctaccgctgtaccgtatccggctgccgcctcaagaaatccaccaaaacaccatgagataagaagtacctggatacgtttgtcatcactaacactcgctcaatcatttggtctgctatctcaacagattgctttcaacattattgtcagaatctggagcagattgaagatcgcatacttcaactcgatcaggaaatatctcgcctgttacctgagtgatctctgtgcaatctggtctgccagttgcaggctcttaaaggtgttggtcaactaatcgcaataaccctggttgctgaactgggtgatttttcgcgattttccaatcctgaacagctcatggcttttctgggactggtgccaggtgaatattccagcggaaacagcattcgccccagaggaataacaaaagttggaaacagcgaactgagacatctgctttacggatatcaaataaattcagattatttaacagtaaaaccccacttatgtgatgaatctcataaaaaagcaaagtgaagtaataatatccaatttatccctcattccttaagtaagcgtacactggccgcgtacaccatggcataatgatatgttgttttactgatatttccggctggtaaaatccccgacggcccggctgaagctggtgcaggaaagcgggttaattgtcactacgcgggataacctgtctnnnnnnnnnnnnnnnnnnnnnnnnnnnnnnnnnnnnnnnnnnnnnnnnnnnnnnnnnnnnnnnnnnnnnnnnnnnnnnnnnnnnnnnnnnnnnnnnnnnnnnnnnnnnnnnnnnnnnnnnnnnnnnnnnnnnnnnnnnnnnnnnnnnnnnnnnnnnnnnnnnnnnnnnnnnnnnnnnnnnnnnnnnnnnnnnnnnnnnnnnnnnnnnnnnnnnnnnnnnnnnnnnnnnnnnnnnnnnnnnnnnnnnnnnnnnnnnnnnnnnnnnnnnnnnnnnnnnnnnnnnnnnnnnnnnnnnnnnnnnnnnnnnnnnnnnnnnnnnnnnnnnnnnnnnnnnnnnnnnnnnnnnnnnnnnnnnnnnnnnnnnnnnnnnnnnnnnnnnnnnnnnnnnnnnnnnnnnnnnnnnnnnnnnnnnnnnnnnnnnnnnnnnnnnnnnnnnnnnnnnnnnnnnnnnnnnnnnnnnnnnnnnnnnnnnnnnnnnnnnnnnnnnnnnnnnnnnnnnnnnnnnnnnnnnnnnnnnnnnnnnnnnnnnnnnnnnnnnnnnnnnnnnnnnnnnnnnnnnnnnnnnnnnnnnnnnnnnnnnnnnnnnnnnnnnnnnnnnnnnnnnnnnnnnnnnnnnnnnnnnnnnnnnnnnnnnnnnnnnnnnnnnnnnnnnnnnnnnnnnnnnnnnnnnnnnnnnnnnnnnnnnnnnnnnnnnnnnnnnnnnnnnnnnnnnnnnnnnnnnnnnnnnnnnnnnnnnnnnnnnnnnnnnnnnnnnnnnnnnnnnnnnnnnnnnnnnnnnnnnnnnnnnnnnnnnnncttccgctggatcagaaagtgttgccgtctccgcgcccagctcctgcgccagacgtaaggcgctgagaattgcccgacgttttttctccggtaagcgatgcagggcaggggtttcaacatacaccgcgtgccagacactgcccaggcgcgaggccaaccgcgccgccgtgcggaccagtttctcactgccggtgttatgcccgatgcataaaaggatcgcgtcgcgtgtgtgccagactttctcttcgccaggatgcccccgccaggcgcgcatttgctcatctacgcgatcggcagtacggcgcagtgccagttcgcgcagggcgatcagattacctttgcggaaaaaatgttcaatggcgcgctccgcctgcccggcaatatagactttgccttctttcagtcgctggcgcagatcgtccgggggcaagtccaccagtactacgtcgtcggcggcatcaaaaaaaggatcgggcacggtctcccgtacctgaattccggtgacgccgctgaccacatcattcagactttccagatgctgaacgttgacggtagtgaaaacatcaatgccagcttccagcagctcttcgatgtcctgccagcgtttaggatgacgtgaacctggcgcattactgtgcgccagttcgtccattaagatcagtgccggacggcgggcgagggcggcatcgagatcaaactcgctgatgtgccgcccacggtacgcctggcgttttaacggcagaacagccagacctttcagcatggcggcggtatctttccgaccgtgggtttctaccacgccaaccacaatatccagcccttgcgcccgcagtcgctgggcttccgccagcatcgcccaggtcttcccgacgcctgcgcaggcaccgaagaatactttcagcttcccccgatgcggcgcggcagcttgttccagcagacgatcggggtcgggacgtaagggttcgttattcatcaagcttatccagtgccagattgagttcgacaatgttgacgaccggctggccgatatatttcaccagcggttgttggctgtattttgcgatcagttgcgtgagctgttcaacgctgagattacgcgctttcgccacgcgtgggatctgccaggccgccgcttgcggggtgatgttattgtccagcccgcttgctgacgccgtcaccagttcaaccggaacgttcgtgctggcatccgggttagcagcccgtaatgcggcaacgcgtgcggctatctgtttatccagctccgggttactgactgccagattgctcccgccagaagcctgtggattatagggcatttctgctgttgccgacgggcgaccatgaaaatagccgttgccggtaaaattttgcccgattaatgccgaaccgcgcaccgtatcaccttcacgaatcaatgaaccgttggcctgccagggaaaccaccattgccccagtgcggtggtcagcagcgggtaaacgccgccagtaatcaataacagaaagagaaatgtcgataatgccggacgtaatccacgcatggtaaacctcacaccagaccgcaaacggttagcagtaaatcaatgactttgataccaataaacggcaccagcagcccacccagaccgtaaatccataagttacggcgcaacatggcagaagcggtaagcggtttataactcacgccttttaacgccaggggaatcaaaaagacgataatcaaggcgttgaaaatgaccgcactgagaatggcggagtcgggcgaatgcaggcgcatgatgttcagcgcatttaactgcggatacgttgccgcgaacgccgctggaataatggcgaagtatttcgccacatcgttggcaatgctgaaggtggtcaacgagccacgggtcatcagcatctgtttgccaatgtgcactacctcgatcaacttggtcgggttggagtcgagatccaccatattgcccgcttctttcgccgcctgggtgccggagttcatcgccaccgcaacatcggcctgtgccagcgccggagcatcgttggtgccatcgccggtcatcgccactaaacggccttccgcctgatactgacgaatcagtgccagcttggcctccggtgttgcttcggcgagaaaatcatcgacacccgcttccgcagctatcgcggcggcagtcaggcggttatcgccggtaatcatcaccgttttaatgcccattttacgcagctgggcgaagcgctctttaataccgcctttgacgatatctttcagcgcaataacgcccagcacacgagaaccttccaccaccaccagcggcgtggctccctgacgcgcaacctgatcgactttttgatcaacatcggcagggaagtgaccgccgttagcctcaacatggcggcgaatggcatcgacagaacctttacggatcatgcggttgtcgatgttgatcccgctcatccggctttgtgcagtaaacggtacaaaggtggcatggagcgactgcacatcgcgctcgcgcaggttaaaacgctgcttggcgaggatcacaatactgcggccttccggcgtttcatcagccagcgaagccagttgtgcggcgtcggccagcgctttttcctccacgccttgtgcggggataaactctgacgcctgacggttaccgagggtgatggtgccggttttatccagcagcagaacgtcaacatcacccgctgcttcaactgctcgcccgctggtggcaataacattcgcgcccagcatccgactcatcccggcgacgccaatcgctgacaacaggccgccaatagtggttgggatcagacagaccagcagtgccaccagtaccgttacgctgactgcattaccgccccacgcggaaaacggccacagcgtggcggttgccagtaaaaagacgatagtcagggcaatcaggagaatggtcagggcaatctcgttcggcgttttacgtcgctgcgcaccttccaccatcgcgatcatccgatccagaaatgtctcgccggggttaacgctgcactcaatcaccagccagtcagaaagaatacgcgtgccgccagtgacggaggcaaaatcaccgccggattcacggatcaccggtgctgattccccggtgatggcgctttcatcgaccgatgcgccgccttcaatgacttcaccatcgcaggggataatatcgccagcttctaccagcacgatgtcacctttacgcagttgatcagcaggaactttgtccgccgcagcgccatatttcggttcgcgcagtttgcgagcaaaagcggtttttttcacccctttcagactgttggcctgcgctttactgcggccttctgccaacgcctcggcgaaattagcgaacagtacggtgacccacagccagccgctaattgccgcgctaaacagcgcattgccaggcatcacaccgcttgccatcgcgatgctaatacaggtggtcagcagacttccgatccagacgataaacatcaccggattgcgccattgcgcctgcgggtttaattttttcaccgcttctttcagcgcctgaacgacaagtgttggttcgaatagcgccagttgtttacgactcatattcagtgctcactcaatatcatcaggagagatattccgccaccggaccaagcgccagggcagggataaaggtcagtgcgccaaccagcaacacggtgccgattaacaggccaacaaacagcgggccgtgcgttggcaatgtgccggagctggcgggttggctctttttactcaccagcgaaccggcaattgccatcaccgggataatcaccccgaagcgcccgacaaacatgcacaacgccagtaaacagttccagaatggagagttggcgcttaatccggcaaaggcgctgccgttgttgttagcggcggatgacacggcgtacagcacttcgctaaaaccatgcgggccagggttgagcatggcgctacgtccggcgtcggtcatcattgccagcgccgcgcccatcagcaccagcgtcggggtgaccagaatcgccagtgcagtcagtttcatctcgcgtacgtcgatttttttacccagatattccggtgtacgaccaatcatcagcccggcaataaacaccgccagcaggacaaacagcatcatgccgtaaaggccggaaccgacgccgccgaataccacttcaccaatttnnnnnnnnnnnnnnnnnnnnnnnnnnnnnnnnnnnnnnnnnnnnnnnnnnnnnnnnnnnnnnnnnnnnnnnnnnnnnnnnnnnnnnnnnnnnnnnnnnnnnnnnnnnnnnnnnnnnnnnnnnnnnnnnnnnnnnnnnnnnnnnnnnnnnnnnnnnnnnnnnnnnnnnnnnnnnnnnnnnnnnnnnnnnnnnnnnnnnnnnnnnnnnnnnnnnnnnnnnnnnnnnnnnnnnnnnnnnnnnnnnnnnnnnnnnnnnnnnnnnnnnnnnnnnnnnnnnnnnnnnnnnnnnnnnnnnnnnnnnnnnnnnnnnnnnnnnnnnnnnnnnnnnnnnnnnnnnnnnnnnnnnnnnnnnnnnnnnnnnnnnnnnnnnnnnnnnnnnnnnnnnnnnnnnnnnnnnnnnnnnnnnnnnnnnnnnnnnnnnnnnnnnnnnnnnnnnnnnnnnnnnnnnnnnnnnnnnnnnnnnnnnnnnnnnnnnnnnnnnnnnnnnnnnnnnnnnnnnnnnnnnnnnnnnnnnnnnnnnnnnnnnnnnnnnnnnnnnnnnnnnnnnttctttaaggtaaggaggtgatccaaccgcaggttcccctacggttaccttgttacgacttcaccccagtcatgaatcacaaagtggtaagcgccctcccgaaggttaagctacctacttcttttgcaacccactcccatggtgtgacgggcggtgtgtacaaggcccgggaacgtattcaccgtggcattctgatccacgattactagcgattccgacttcatggagtcgagttgcagactccaatccggactacgacgcactttatgaggtccgcttgctctcgcgagatcgcttctctttgtatgcgccattgtagcacgtgtgtagccctggtcgtaagggccatgatgacttgacgtcatccccaccttcctccagtttatcactggcagtctcctttgagttcccggccggaccgctggcaacaaaggataagggttgcgctcgttgcgggacttaacccaacatttcacaacacgagctgacgacagccatgcagcacctgtctnnnnnnnnnnnnnnnnnnnnnnnnnnnnnnnnnnnnnnnnnnnnnnnnnnnnnnnnnnnnnnnnnnnnnnnnnnnnnnnnnnnnnnnnnnnnnnnnnnnnnnnnnnnnnnnnnnnnnnnnnnnnnnnnnnnnnnnnnnnnnnnnnnnnnnnnnnnnnnnnnnnnnnnnnnnnnnnnnnnnnnnnnnnnnnnnnnnnnnnnnnnnnnnnnnnnnnnnnnnnnnnnnnnnnnnnnnnnnnnnnnnnnnnnnnnnnnnnnnnnnnnnnnnnnnnnnnnnnnnnnnnnnnnnnnnnnnnnnnnnnnnnnnnnnnnnnnnnnnnnnnnnnnnnnnnnnnnnnnnnnnnnnnnnnnnnnnnnnnnnnnnnnnnnnnnnnnnnnnnnnnnnnnnnnnnnnnnnnnnnnnnnnnnnnnnnnnnnnnnnnnnnnnnnnnnnnnnnnnnnnnnnnnnnnnnnnnnnnnnnnnnnnnnnnnnnnnnnnnnnnnnnnnnnnnnnnnnnnnnnnnnnnnnnnnnnnnnnnnnnnnnnnnnnnnnnnnnnnnnnnnnnnnnnnnnnnnnnnnnnnnnnnnnnnnnnnnnnnnnnnnnnnnnnnnnnnnnnnnnnnnnnnnnnnnnnnnnnnnnnnnnnnnnnnnnnnnnnnnnnnnnnnnnnnnnnnnnnnnnnnnnnnnnnnnnnnnnnnnnnnnnnnnnnnnnnnnnnnnnnnnnnnnnnnnnnnnnnnnnnnnnnnnnnnnnnnnnnnnnnnnnnnnnnnnnnnnnnnnnnnnnnnnnnnnnnnnnnnnnnnnnnnnnnnnnnnnnnnnnnnnnnnnnnnnnnnnnnnnnnnnnnnnnnnnnnnnnnnnnnnnnnnnnnnnnnnnnnnnnnnnnnnnnnnnnnnnnnnnnnnnnnnnnnnnnnnnnnnnnnnnnnnnnnnnnnnnnnnnnnnnnnnnnnnnnnnnnnnnnnnnnnnnnnnnnnnnnnnnnnnnnnnnnnnnnnnnnnnnnnnnnnnnnnnnnnnnnnnnnnnnnnnnnnnnnnnnnnnnnnnnnnnnnnnnnnnnnnnnnnnnnnnnnnnnnnnnnnnnnnnnnnnnnnnnnnnnnnnnnnnnnnnnnnnnnnnnnnnnnnnnnnnnnnnnnnnnnnnnnnnnnnnnnnnnnnnnnnnnnnnnnnnnnnnnnnnnnnnnnnnnnnnnnnnnnnnnnnnnnnnnnnnnnnnnnnnnnnnnnnnnnnnnnnnnnnnnnnnnnnnnnnnnnnnnnnnnnnnnnnnnnnnnnnnnnnnnnnnnnnnnnnnnnnnnnnnnnnnnnnnnnnnnnnnnnnnnnnnnnnnnnnnnnnnnnnnnnnnnnnnnnnnnnnnnnnnnnnnnnnnnnnnnnnnnnnnnnnnnnnnnnnnnnnnnnnnnnnnnnnnnnnnnnnnnnnnnnnnnnnnnnnnnnnnnnnnnnnnnnnnnnnnnnnnnnnnnnnnnnnnnnnnnnnnnnnnnnnnnnnnnnnnnnnnnnnnnnnnnnnnnnnnnnnnnnnnnnnnnnnnnnnnnnnnnnnnnnnnnnnnnnnnnnnnnnnnnnnnnnnnnnnnnnnnnnnnnnnnnnnnnnnnnnnnnnnnnnnnnnnnnnnnnnnnnnnnnnnnnnnnnnnnnnnnnnnnnnnnnnnnnnnnnnnnnnnnnnnnnnnnnnnnnnnnnnnnnnnnnnnnnnnnnnnnnnnnnnnnnnnnnnnnnnnnnnnnnnnnnnnnnnnnnnnnnnnnnnnnnnnnnnnnnnnnnnnnnnnnnnnnnnnnnnnnnnnnnnnnnnnnnnnnnnnnnnnnnnnnnnnnnnnnnnnnnnnnnnnnnnnnnnnnnnnnnnnnnnnnnnnnnnnnnnnnnnnnnnnnnnnnnnnnnnnnnnnnnnnnnnnnnnnnnnnnnnnnnnnnnnnnnnnnnnnnnnnnnnnnnnnnnnnnnnnnnnnnnnnnnnnnnnnnnnnnnnnnnnnnnnnnnnnnnnnnnnnnnnnnnnnnnnnnnnnnnnnnnnnnnnnnnnnnnnnnnnnnnnnnnnnnnnnnnnnnnnnnnnnnnnnnnnnnnnnnnnnnnnnnnnnnnnnnnnnnnnnnnnnnnnnnnnnnnnnnnnnnnnnnnnnnnnnnnnnnnnnnnnnnnnnnnnnnnnnnnnnnnnnnnnnnnnnnnnnnnnnnnnnnnnnnnnnnnnnnnnnnnnnnnnnnnnnnnnnnnnnnnnnnnnnnnnnnnnnnnnnnnnnnnnnnnnnnnnnnnnnnnnnnnnnnnnnnnnnnnnnnnnnnnnnnnnnnnnnnnnnnnnnnnnnnnnnnnnnnnnnnnnnnnnnnnnnnnnnnnnnnnnnnnnnnnnnnnnnnnnnnnnnnnnnnnnnnnnnnnnnnnnnnnnnnnnnnnnnnnnnnnnnnnnnnnnnnnnnnnnnnnnnnnnnnnnnnnnnnnnnnnnnnnnnnnnnnnnnnnnnnnnnnnnnnnnnnnnnnnnnnnnnnnnnnnnnnnnnnnnnnnnnnnnnnnnnnnnnnnnnnnnnnnnnnnnnnnnnnnnnnnnnnnnnnnnnnnnnnnnnnnnnnnnnnnnnnnnnnnnnnnnnnnnnnnnnnnnnnnnnnnnnnnnnnnnnnnnnnnnnnnnnnnnnnnnnnnnnnnnnnnnnnnnnnnnnnnnnnnnnnnnnnnnnnnnnnnnnnnnnnnnnnnnnnnnnnnnnnnnnnnnnnnnnnnnnnnnnnnnnnnnnnnnnnnnnnnnnnnnnnnnnnnnnnnnnnnnnnnnnnnnnnnnnnnnnnnnnnnnnnnnnnnnnnnnnnnnnnnnnnnnnnnnnnnnnnnnnnnnnnnnnnnnnnnnnnnnnnnnnnnnnnnnnnnnnnnnnnnnnnnnnnnnnnnnnnnnnnnnnnnnnnnnnnnnnnnnnnnnnnnnnnnnnnnnnnnnnnnnnnnnnnnnnnnnnnnnnnnnnnnnnnnnnnnnnnnnnnnnnnnnnnnnnnnnnnnnnnnnnnnnnnnnnnnnnnnnnnnnnnnnnnnnnnnnnnnnnnnnnnnnnnnnnnnnnnnnnnnnnnnnnnnnnnnnnnnnnnnnnnnnnnnnnnnnnnnnnnnnnnnnnnnnnnnnnnnnnnnnnnnnnnnnnnnnnnnnnnnnnnnnnnnnnnnnnnnnnnnnnnnnnnnnnnnnnnnnnnnnnnnnnnnnnnnnnnnnnnnnnnnnnnnnnnnnnnnnnnnnnnnnnnnnnnnnnnnnnnnnnnnnnnnnnnnnnnnnnnnnnnnnnnnnnnnnnnnnnnnnnnnnnnnnnnnnnnnnnnnnnnnnnnnnnnnnnnnnnnnnnnnnnnnnnnnnnnnnnnnnnnnnnnnnnnnnnnnnnnnnnnnnnnnnnnnnnnnnnnnnnnnnnnnnnnnnnnnnnnnnnnnnnnnnnnnnnnnnnnnnnnnnnnnnnnnnnnnnnnnnnnnnnnnnnnnnnnnnnnnnnnnnnnnnnnnnnnnnnnnnnnnnnnnnnnnnnnnnnnnnnnnnnnnnnnnnnnnnnnnnnnnnnnnnnnnnnnnnnnnnnnnnnnnnnnnnnnnnnnnnnnnnnnnnnnnnnnnnnnnnnnnnnnnnnnnnnnnnnnnnnnnnnnnnnnnnnnnnnnnnnnnnnnnnnnnnnnnnnnnnnnnnnnnnnnnnnnnnnnnnnnnnnnnnnnnnnnnnnnnnnnnnnnnnnnnnnnnnnnnnnnnnnnnnnnnnnnnnnnnnnnnnnnnnnnnnnnnnnnnnnnnnnnnnnnnnnnnnnnnnnnnnnnnnnnnnnnnnnnnnnnnnnnnnnnnnnnnnnnnnnnnnnnnnnnnnnnnnnnnnnnnnnnnnnnnnnnnnnnnnnnnnnnnnnnnnnnnnnnnnnnnnnnnnnnnnnnnnnnnnnnnnnnnnnnnnnnnnnnnnnnnnnnnnnnnnnnnnnnnnnnnnnnnnnnnnnnnnnnnnnnnnnnnnnnnnnnnnnnnnnnnnnnnnnnnnnnnnnnnnnnnnnnnnnnnnnnnnnnnnnnnnnnnnnnnnnnnnnnnnnnnnnnnnnnnnnnnnnnnnnnnnnnnnnnnnnnnnnnnnnnnnnnnnnnnnnnnnnnnnnnnnnnnnnnnnnnnnnnnnnnnnnnnnnnnnnnnnnnnnnnnnnnnnnnnnnnnnnnnnnnnnnnnnnnnnnnnnnnnnnnnnnnnnnnnnnnnnnnnnnnnnnnnnnnnnnnnnnnnnnnnnnnnnnnnnnnnnnnnnnnnnnnnnnnnnnnnnnnnnnnnnnnnnnnnnnnnnnnnnnnnnnnnnnnnnnnnnnnnnnnnnnnnnnnnnnnnnnnnnnnnnnnnnnnnnnnnnnnnnnnnnnnnnnnnnnnnnnnnnnnnnnnnnnnnnnnnnnnnnnnnnnnnnnnnnnnnnnnnnnnnnnnnnnnnnnnnnnnnnnnnnnnnnnnnnnnnnnnnnnnnnnnnnnnnnnnnnnnnnnnnnnnnnnnnnnnnnnnnnnnnnnnnnnnnnnnnnnnnnnnnnnnnnnnnnnnnnnnnnnnnnnnnnnnnnnnnnnnnnnnnnnnnnnnnnnnnnnnnnnnnnnnnnnnnnnnnnnnnnnnnnnnnnnnnnnnnnnnnnnnnnnnnnnnnnnnnnnnnnnnnnnnnnnnnnnnnnnnnnnnnnnnnnnnnnnnnnnnnnnnnnnnnnnnnnnnnnnnnnnnnnnnnnnnnnnnnnnnnnnnnnnnnnnnnnnnnnnnnnnnnnnnnnnnnnnnnnnnnnnnnnnnnnnnnnnnnnnnnnnnnnnnnnnnnnnnnnnnnnnnnnnnnnnnnnnnnnnnnnnnnnnnnnnnnnnnnnnnnnnnnnnnnnnnnnnnnnnnnnnnnnnnnnnnnnnnnnnnnnnnnnnnnnnnnnnnnnnnnnnnnnnnnnnnnnnnnnnnnnnnnnnnnnnnnnnnnnnnnnnnnnnnnnnnnnnnnnnnnnnnnnnnnnnnnnnnnnnnnnnnnnnnnnnnnnnnnnnnnnnnnnnnnnnnnnnnnnnnnnnnnnnnnnnnnnnnnnnnnnnnnnnnnnnnnnnnnnnnnnnnnnnnnnnnnnnnnnnnnnnnnnnnnnnnnnnnnnnnnnnnnnnnnnnnnnnnnnnnnnnnnnnnnnnnnnnnnnnnnnnnnnnnnnnnnnnnnnnnnnnnnnnnnnnnnnnnnnnnnnnnnnnnnnnnnnnnnnnnnnnnnnnnnnnnnnnnnnnnnnnnnnnnnnnnnnnnnnnnnnnnnnnnnnnnnnnnnnnnnnnnnnnnnnnnnnnnnnnnnnnnnnnnnnnnnnnnnnnnnnnnnnnnnnnnnnnnnnnnnnnnnnnnnnnnnnnnnnnnnnnnnnnnnnnnnnnnnnnnnnnnnnnnnnnnnnnnnnnnnnnnnnnnnnnnnnnnnnnnnnnnnnnnnnnnnnnnnnnnnnnnnnnnnnnnnnnnnnnnnnnnnnnnnnnnnnnnnnnnnnnnnnnnnnnnnnnnnnnnnnnnnnnnnnnnnnnnnnnnnnnnnnnnnnnnnnnnnnnnnnnnnnnnnnnnnnnnnnnnnnnnnnnnnnnnnnnnnnnnnnnnnnnnnnnnnnnnnnnnnnnnnnnnnnnnnnnnnnnnnnnnnnnnnnnnnnnnnnnnnnnnnnnnnnnnnnnnnnnnnnnnnnnnnnnnnnnnnnnnnnnnnnnnnnnnnnnnnnnnnnnnnnnnnnnnnnnnnnnnnnnnnnnnnnnnnnnnnnnnnnnnnnnnnnnnnnnnnnnnnnnnnnnnnnnnnnnnnnnnnnnnnnnnnnnnnnnnnnnnnnnnnnnnnnnnnnnnnnnnnnnnnnnnnnnnnnnnnnnnnnnnnnnnnnnnnnnnnnnnnnnnnnnnnnnnnnnnnnnnnnnnnnnnnnnnnnnnnnnnnnnnnnnnnnnnnnnnnnnnnnnnnnnnnnnnnnnnnnnnnnnnnnnnnnnnnnnnnnnnnnnnnnnnnnnnnnnnnnnnnnnnnnnnnnnnnnnnnnnnnnnnnnnnnnnnnnnnnnnnnnnnnnnnnnnnnnnnnnnnnnnnnnnnnnnnnnnnnnnnnnnnnnnnnnnnnnnnnnnnnnnnnnnnnnnnnnnnnnnnnnnnnnnnnnnnnnnnnnnnnnnnnnnnnnnnnnnnnnnnnnnnnnnnnnnnnnnnnnnnnnnnnnnnnnnnnnnnnnnnnnnnnnnnnnnnnnnnnnnnnnnnnnnnnnnnnnnnnnnnnnnnnnnnnnnnnnnnnnnnnnnnnnnnnnnnnnnnnnnnnnnnnnnnnnnnnnnnnnnnnnnnnnnnnnnnnnnnnnnnnnnnnnnnnnnnnnnnnnnnnnnnnnnnnnnnnnnnnnnnnnnnnnnnnnnnnnnnnnnnnnnnnnnnnnnnnnnnnnnnnnnnnnnnnnnnnnnnnnnnnnnnnnnnnnnnnnnnnnnnnnnnnnnnnnnnnnnnnnnnnnnnnnnnnnnnnnnnnnnnnnnnnnnnnnnnnnnnnnnnnnnnnnnnnnnnnnnnnnnnnnnnnnnnnnnnnnnnnnnnnnnnnnnnnnnnnnnnnnnnnnnnnnnnnnnnnnnnnnnnnnnnnnnnnnnnnnnnnnnnnnnnnnnnnnnnnnnnnnnnnnnnnnnnnnnnnnnnnnnnnnnnnnnnnnnnnnnnnnnnnnnnnnnnnnnnnnnnnnnnnnnnnnnnnnnnnnnnnnnnnnnnnnnnnnnnnnnnnnnnnnnnnnnnnnnnnnnnnnnnnnnnnnnnnnnnnnnnnnnnnnnnnnnnnnnnnnnnnnnnnnnnnnnnnnnnnnnnnnnnnnnnnnnnnnnnnnnnnnnnnnnnnnnnnnnnnnnnnnnnnnnnnnnnnnnnnnnnnnnnnnnnnnnnnnnnnnnnnnnnnnnnnnnnnnnnnnnnnnnnnnnnnnnnnnnnnnnnnnnnnnnnnnnnnnnnnnnnnnnnnnnnnnnnnnnnnnnnnnnnnnnnnnnnnnnnnnnnnnnnnnnnnnnnnnnnnnnnnnnnnnnnnnnnnnnnnnnnnnnnnnnnnnnnnnnnnnnnnnnnnnnnnnnnnnnnnnnnnnnnnnnnnnnnnnnnnnnnnnnnnnnnnnnnnnnnnnnnnnnnnnnnnnnnnnnnnnnnnnnnnnnnnnnnnnnnnnnnnnnnnnnnnnnnnnnnnnnnnnnnnnnnnnnnnnnnnnnnnnnnnnnnnnnnnnnnnnnnnnnnnnnnnnnnnnnnnnnnnnnnnnnnnnnnnnnnnnnnnnnnnnnnnnnnnnnnnnnnnnnnnnnnnnnnnnnnnnnnnnnnnnnnnnnnnnnnnnnnnnnnnnnnnnnnnnnnnnnnnnnnnnnnnnnnnnnnnnnnnnnnnnnnnnnnnnnnnnnnnnnnnnnnnnnnnnnnnnnnnnnnnnnnnnnnnnnnnnnnnnnnnnnnnnnnnnnnnnnnnnnnnnnnnnnnnnnnnnnnnnnnnnnnnnnnnnnnnnnnnnnnnnnnnnnnnnnnnnnnnnnnnnnnnnnnnnnnnnnnnnnnnnnnnnnnnnnnnnnnnnnnnnnnnnnnnnnnnnnnnnnnnnnnnnnnnnnnnnnnnnnnnnnnnnnnnnnnnnnnnnnnnnnnnnnnnnnnnnnnnnnnnnnnnnnnnnnnnnnnnnnnnnnnnnnnnnnnnnnnnnnnnnnnnnnnnnnnnnnnnnnnnnnnnnnnnnnnnnnnnnnnnnnnnnnnnnnnnnnnnnnnnnnnnnnnnnnnnnnnnnnnnnnnnnnnnnnnnnnnnnnnnnnnnnnnnnnnnnnnnnnnnnnnnnnnnnnnnnnnnnnnnnnnnnnnnnnnnnnnnnnnnnnnnnnnnnnnnnnnnnnnnnnnnnnnnnnnnnnnnnnnnnnnnnnnnnnnnnnnnnnnnnnnnnnnnnnnnnnnnnnnnnnnnnnnnnnnnnnnnnnnnnnnnnnnnnnnnnnnnnnnnnnnnnnnnnnnnnnnnnnnnnnnnnnnnnnnnnnnnnnnnnnnnnnnnnnnnnnnnnnnnnnnnnnnnnnnnnnnnnnnnnnnnnnnnnnnnnnnnnnnnnnnnnnnnnnnnnnnnnnnnnnnnnnnnnnnnnnnnnnnnnnnnnnnnnnnnnnnnnnnnnnnnnnnnnnnnnnnnnnnnnnnnnnnnnnnnnnnnnnnnnnnnnnnnnnnnnnnnnnnnnnnnnnnnnnnnnnnnnnnnnnnnnnnnnnnnnnnnnnnnnnnnnnnnnnnnnnnnnnnnnnnnnnnnnnnnnnnnnnnnnnnnnnnnnnnnnnnnnnnnnnnnnnnnnnnnnnnnnnnnnnnnnnnnnnnnnnnnnnnnnnnnnnnnnnnnnnnnnnnnnnnnnnnnnnnnnnnnnnnnnnnnnnnnnnnnnnnnnnnnnnnnnnnnnnnnnnnnnnnnnnnnnnnnnnnnnnnnnnnnnnnnnnnnnnnnnnnnnnnnnnnnnnnnnnnnnnnnnnnnnnnnnnnnnnnnnnnnnnnnnnnnnnnnnnnnnnnnnnnnnnnnnnnnnnnnnnnnnnnnnnnnnnnnnnnnnnnnnnnnnnnnnnnnnnnnnnnnnnnnnnnnnnnnnnnnnnnnnnnnnnnnnnnnnnnnnnnnnnnnnnnnnnnnnnnnnnnnnnnnnnnnnnnnnnnnnnnnnnnnnnnnnnnnnnnnnnnnnnnnnnnnnnnnnnnnnnnnnnnnnnnnnnnnnnnnnnnnnnnnnnnnnnnnnnnnnnnnnnnnnnnnnnnnnnnnnnnnnnnnnnnnnnnnnnnnnnnnnnnnnnnnnnnnnnnnnnnnnnnnnnnnnnnnnnnnnnnnnnnnnnnnnnnnnnnnnnnnnnnnnnnnnnnnnnnnnnnnnnnnnnnnnnnnnnnnnnnnnnnnnnnnnnnnnnnnnnnnnnnnnnnnnnnnnnnnnnnnnnnnnnnnnnnnnnnnnnnnnnnnnnnnnnnnnnnnnnnnnnnnnnnnnnnnnnnnnnnnnnnnnnnnnnnnnnnnnnnnnnnnnnnnnnnnnnnnnnnnnnnnnnnnnnnnnnnnnnnnnnnnnnnnnnnnnnnnnnnnnnnnnnnnnnnnnnnnnnnnnnnnnnnnnnnnnnnnnnnnnnnnnnnnnnnnnnnnnnnnnnnnnnnnnnnnnnnnnnnnnnnnnnnnnnnnnnnnnnnnnnnnnnnnnnnnnnnnnnnnnnnnnnnnnnnnnnnnnnnnnnnnnnnnnnnnnnnnnnnnnnnnnnnnnnnnnnnnnnnnnnnnnnnnnnnnnnnnnnnnnnnnnnnnnnnnnnnnnnnnnnnnnnnnnnnnnnnnnnnnnnnnnnnnnnnnnnnnnnnnnnnnnnnnnnnnnnnnnnnnnnnnnnnnnnnnnnnnnnnnnnnnnnnnnnnnnnnnnnnnnnnnnnnnnnnnnnnnnnnnnnnnnnnnnnnnnnnnnnnnnnnnnnnnnnnnnnnnnnnnnnnnnnnnnnnnnnnnnnnnnnnnnnnnnnnnnnnnnnnnnnnnnnnnnnnnnnnnnnnnnnnnnnnnnnnnnnnnnnnnnnnnnnnnnnnnnnnnnnnnnnnnnnnnnnnnnnnnnnnnnnnnnnnnnnnnnnnnnnnnnnnnnnnnnnnnnnnnnnnnnnnnnnnnnnnnnnnnnnnnnnnnnnnnnnnnnnnnnnnnnnnnnnnnnnnnnnnnnnnnnnnnnnnnnnnnnnnnnnnnnnnnnnnnnnnnnnnnnnnnnnnnnnnnnnnnnnnnnnnnnnnnnnnnnnnnnnnnnnnnnnnnnnnnnnnnnnnnnnnnnnnnnnnnnnnnnnnnnnnnnnnnnnnnnnnnnnnnnnnnnnnnnnnnnnnnnnnnnnnnnnnnnnnnnnnnnnnnnnnnnnnnnnnnnnnnnnnnnnnnnnnnnnnnnnnnnnnnnnnnnnnnnnnnnnnnnnnnnnnnnnnnnnnnnnnnnnnnnnnnnnnnnnnnnnnnnnnnnnnnnnnnnnnnnnnnnnnnnnnnnnnnnnnnnnnnnnnnnnnnnnnnnnnnnnnnnnnnnnnnnnnnnnnnnnnnnnnnnnnnnnnnnnnnnnnnnnnnnnnnnnnnnnnnnnnnnnnnnnnnnnnnnnnnnnnnnnnnnnnnnnnnnnnnnnnnnnnnnnnnnnnnnnnnnnnnnnnnnnnnnnnnnnnnnnnnnnnnnnnnnnnnnnnnnnnnnnnnnnnnnnnnnnnnnnnnnnnnnnnnnnnnnnnnnnnnnnnnnnnnnnnnnnnnnnnnnnnnnnnnnnnnnnnnnnnnnnnnnnnnnnnnnnnnnnnnnnnnnnnnnnnnnnnnnnnnnnnnnnnnnnnnnnnnnnnnnnnnnnnnnnnnnnnnnnnnnnnnnnnnnnnnnnnnnnnnnnnnnnnnnnnnnnnnnnnnnnnnnnnnnnnnnnnnnnnnnnnnnnnnnnnnnnnnnnnnnnnnnnnnnnnnnnnnnnnnnnnnnnnnnnnnnnnnnnnnnnnnnnnnnnnnnnnnnnnnnnnnnnnnnnnnnnnnnnnnnnnnnnnnnnnnnnnnnnnnnnnnnnnnnnnnnnnnnnnnnnnnnnnnnnnnnnnnnnnnnnnnnnnnnnnnnnnnnnnnnnnnnnnnnnnnnnnnnnnnnnnnnnnnnnnnnnnnnnnnnnnnnnnnnnnnnnnnnnnnnnnnnnnnnnnnnnnnnnnnnnnnnnnnnnnnnnnnnnnnnnnnnnnnnnnnnnnnnnnnnnnnnnnnnnnnnnnnnnnnnnnnnnnnnnnnnnnnnnnnnnnnnnnnnnnnnnnnnnnnnnnnnnnnnnnnnnnnnnnnnnnnnnnnnnnnnnnnnnnnnnnnnnnnnnnnnnnnnnnnnnnnnnnnnnnnnnnnnnnnnnnnnnnnnnnnnnnnnnnnnnnnnnnnnnnnnnnnnnnnnnnnnnnnnnnnnnnnnnnnnnnnnnnnnnnnnnnnnnnnnnnnnnnnnnnnnnnnnnnnnnnnnnnnnnnnnnnnnnnnnnnnnnnnnnnnnnnnnnnnnnnnnnnnnnnnnnnnnnnnnnnnnnnnnnnnnnnnnnnnnnnnnnnnnnnnnnnnnnnnnnnnnnnnnnnnnnnnnnnnnnnnnnnnnnnnnnnnnnnnnnnnnnnnnnnnnnnnnnnnnnnnnnnnnnnnnnnnnnnnnnnnnnnnnnnnnnnnnnnnnnnnnnnnnnnnnnnnnnnnnnnnnnnnnnnnnnnnnnnnnnnnnnnnnnnnnnnnnnnnnnnnnnnnnnnnnnnnnnnnnnnnnnnnnnnnnnnnnnnnnnnnnnnnnnnnnnnnnnnnnnnnnnnnnnnnnnnnnnnnnnnnnnnnnnnnnnnnnnnnnnnnnnnnnnnnnnnnnnnnnnnnnnnnnnnnnnnnnnnnnnnnnnnnnnnnnnnnnnnnnnnnnnnnnnnnnnnnnnnnnnnnnnnnnnnnnnnnnnnnnnnnnnnnnnnnnnnnnnnnnngttcgtctgacggcagaagaagaccaggaaatcagaaaaagggctgctgaatgcggcaagaccgtttccggttttttacgggcggcagctctcggtaagaaagttaactcactgactgatgatcgggtactgaaagaagttatgagactgggggcgttacagaaaaaactctttatcgacggcaagcgtgtcggggacagggagtatgcggaggtgctgatcgctattacggagtatcaccgtgccctgttatccaggcttatggcagattagcttcccggagagaaaactgtcgaaaactgacggtatgaacaccgtaagctcccaaagtgatcaccattcgctttcatgcatagctatgcagcgagctgaaaacgatcctgacgcatccttcctgtttttccggggtaaaacatctctttttgcggtgtctgcgtcagaatcgcgttcagcgcgtttcagtggtgcgtacaattaagggattatggtaaatatatgagctatgcgataactttaactgtgaagcgatgaacccattacaggcaaagccaattactcctgacagtggtttagccagaagcagggctaccaagaccaatgcaataagtaatatatcgttttgctatcgtgcatcgctcgcgctcagttccattgtgcttttttaagctgtcgtttttcttacggtatataccggttttttatggcgtggtttcttaacttgttcagctactgatggacccattgtatctaggtagtcaactagctttgttagatcataaatattgcgaccaccatatcggcgatcactcttcgatgttggtttcttgtccaagagattagctttttcaagatcattgatagctctctgaacagtccgtacagaaacccccatacgtatggctagactttccattgacggatgcggccactcttgcaaactccaccagtgaacgatcaggttaagtagtgtgttaaaggccactgaagttagctttttctcgttttgtataaaaaacaatacggtaggcactgctgtccagccaagagacaaaccgccagctttccatttattcttaacggagtaagtcattgattttcctaagccccaaaatatttaaagtatatattatatggtatattcatatgaatagggtgacactggcgccattattgtgcaaccaaaaaagactactctgaaaacgaggaaaagattttttcctgcctgaattagatacggagttagcgatatgaaaaccgaacaacgtcatgatcttgttaaagatattgaggtttttggcgtatccttgtctctgttgatttccagagcgaatgagaagtctgttacaatgccatctggtctaagtcgggagcagagaagagcatgggcagcggagcaggcgcgcaaaatccacaattgaatattgtctcattctctgagaccttcaacctttattacacatccagatattctgcaaaaacactcgataaaatcgatgatttcattgagcattttgaaaaatacaatctctttggcgatcctttaaaaggatatccagcttggactggcaaagtatcgccatcgtggaaagtgcctgatcattacgaaaacaaagaagctattgagaagtatgctagagctaacaaattatggcatgctcatttaggcgatccggtttttaaagatacgtttcatgggaaatacaaggtttctgactgggttattcatttccagcggctgacaccgaaccatataaagcttttagagcttggataccatgacccaatgaagctacctcaaaactttgaatgatcgagcggcaggctaaatgaaatcttgagattcattcagtctcgtcgtaatctcactattgtaaaaacgaaaaaaccaccctggcaggtggtttttcgaaggttagttaatcctggcagattctctaaccgtggtaacagtcttgtgcgagacatgtcaccaaatactgtcctttcagtgtagcctcagttaggccgccacttcaagaactctcgttacatctctcgcacatcctgcttaccagtggccgttgccagtggcgttaagtcgtgtcttaccgggttggactcaagacgatagttaccggataaggcgcagcggtcgggctgaacggggggttcgtgcacacagcccagcttggagcgaacgacctacaccgaaccgagataccaacagcgtgagctatgagaaagcgccacgcttcccgaagggagaaaggcggacaggtatccggtaagcggcagggtcggaacaggagagcgcacgagggagcttccagggggaaacgcctggtatctttatagtcctgtcgggtttcgccacctctgacttgagcgtcgatttttgtgatgctcgtcaggggggcggagcctatggaaaaacgcctcccgcgcgcccttcttctgggtctttgtcttttgctcacatgttctttccggttttatcccccgattctgtggataaccgtattaccgcctttgagtgagctgacaccgctcgccgcagtcgaacgaccgagcgtagcgagtcagtgagcgaggaagcggaagagcgccttatgtgacattttctccttacgctcctctatgccgttctgcatcctgtccggatgcgttatatcccggtaagattttccgcttcaaagcgtgtctgtatgctgttctggagttcttctgcgagttcgtgcagtttctcacacatggcggcctgttcgtcggcattgagtgcgtccagtttttcgagcagcgtcaggctctgactttttatgaatcccgccatgttgagtacggcttgctgctgcttattcatcttttcgttttctccgttctgtctgtcatctgcgttgtgtgattatatcgcgtaccacttttcgactgttttgctgccgctattctgccgcttggctttttgacgggcatttctgtcagacaacactgtcactgccaaaaaactgccgtgcctttgtcggtaattcgagcttgctgacaggacaggatgtgcaattgttataccgcgcatacatgcacgctattacaattgccctggtcagggctttgccccgacacccatgtcagatacggagccatgttttatgacaaaacgaagtggaagtaatacgcgcaggcgggctatcagtcgccctgttcgtctgacggcagaagaagaccaggaaatcagaaaaagggctgctgaatgcggcaagaccgtttccggttttttacgggcggcagctctcggtaagaaagttaactcactgactgatgatcgggtactgaaagaagttatgagactgggggcgttacagaaaaaactctttatcgacggcaagcgtgtcggggacagggagtatgcggaggtgctgatcgctattacggagtatcaccgtgccctgttatccaggcttatggcagattagcttcccggagagaaaactgtcgaaaactgacggtatgaacaccgtaagctcccaaagtgatcaccattcgctttcatgcatagctatgcagcgagctgaaaacgatcctgacgcatccttcctgtttttccggggtaaaacatctctttttgcggtgtctgcgtcagaatcgcgttcagcgcgtttcagtggtgcgtacaattaagggattatggtaaatatatgagctatgcgataactttaactgtgaagcgatgaacccattacaggcaaagccaattactcctgacagtggtttagccagaagcagggctaccaagaccaatgcaataagtaatatatcgttttgctatcgtgcatcgctcgcgctcagttccattgtgcttttttaagctgtcgtttttcttacggtatataccggttttttatggcgtggtttcttaacttgttcagctactgatggacccattgtatctaggtagtcaactagctttgttagatcataaatattgcgaccaccatatcggcgatcactcttcgatgttggtttcttgtccaagagattagctttttcaagatcattgatagctctctgaacagtccgtacagaaacccccatacgtatggctagactttccattgacggatgcggccactcttgcaaactccaccagtgaacgatcaggttaagtagtgtgttaaaggccactgaagttagctttttctcgttttgtataaaaaacaatacggtaggcactgctgtccagccaagagacaaaccgccagntgccgttcccgccggctccccgtcgtcagagaaacccagttgttgagaatcatccggcgcacccgccacccacgccacgcaatggtggcgggcatcggggtgttctgcccgcaccgattcaacaaacgcttttgccgcctcaacgccatcggtatgcgccaacagcgtaatgaagcggctctttttgatctcttcaacgaccgtgaccggtgccgcaggaattaaccagctttccatcacgccagtttcagatcccgggtcatgttttccacgttgttttcgtgaatcaccacgttgtcttcgatacgaatgccgccgaacggtttcagtgcttcaattttctgccagttgaagtgtttgctgaactgcccttcacgccacggtgccagaagcgattcgatgaagtagatacccggttcgatggttaacaccatgcccggctggagaatacgggtgcagcgcaggtacggatattttgccggtgccgcgaggtgcgtaccgctatcatcctgcataaaaccggctacgtcatgcacctgcaggcccagcggatggccgataccgtgcggcataaacggtccggtgagatcgttttcgaccatcgcttcttcactcatatcggtgatgatttgatgtttacgcagcagtttggcgatgcgctgatggaactggatatggtaatccacatagctgacgcctgctttcatggtggcgatcagcgccagttgctcatcatttacgtctttcaccagctgtgcgtagtcgttgtcgctttttgccgaccaggtacgggttagatcagccgcatagccgttatattcggccccggcatccagcaggaagctgcgcatctcttccggtgcctggtggtccagtttggtgtaatgcaacaccgcagcgtgttcgttaagcgccacaatgttgctataaggtacgtcggtatcacgatgaccggtcgcggtcagataggcaatgttgatatcgaactcgctcatgccagaacggaacgcttcttctgccgcgcgatgaccgttgaccgccattttctgcgcttcacgcatacaggccagttcgtactcggttttgaaggagcgatagtaatgcaggtagtcgatcacccctttcgggttgatattgctggcctcaatacccagttgcagcgcacgttctggcaccggaccgatataaccgatattgccgcgcgcagcaggcaacagactaccaatgccatcggcttttggcagcgcgatcacttctacatcttcagtccagaaggagttcggcagcggttcgacgttgtgccagtaatcaaccggcagataaaaccacagtttcggcttattcacgccatccaccagcagccagcagtttggcacctgagttaccggcacccacgctttgaattgcgggttcactttaaacggatagggatgatcgtcgagaaaaacgttgaacagttcgccggagtgaataagtaacgcatccagcttgaagcgcgccagcgcatcgcgagtccgttcctgtaaggtagctatatgatttttatagagcgaggccagtgattccattttttacccttctgtttttttgaccttaagtctccgcatcttagcacatcgttcatccagagcgtgatttctgccgagcgtgatcagatcggcatttccttaatattttatttgcatatttttaacacaaaatacacacttcgatgcatctggtacgaccagatcaccttgcggattcaggagactgacatgctttacaaaggcgacaccctgtaccttgactggctggaagatggcattgccgaactggtatttgatgccccaggttcagttaataaactcgacactgccaccgtcgccagcctcggcgaggccatcggcgtgctggaacagcaatcagatctaaaagggctgctgctgcgttcgaacaaagcagcctttatcgtcggtgctgatatcaccgaatttttgtccctgttcctcgttcctgaagaacagttaagtcagtggctgcactttgccaatagcgtgtttaatcgcctggaagatctcccggtgccgaccattgctgccgtcaacggctatgcgctgggcggtggctgcgaatgcgtgctggcgaccgattatcgtctggcgacgccggatctgcgcatcggtctgccggaaaccaaactgggcatcatgccgggctttggcggttctgtacgtatgccacgtatgctcggtgctgacagtgcgctggaaatcattgccgccggtaaagatgtcggcgcggatcaggcgctgaaaatcggtctggtggatggtgtagtcaaagcagaaaaactggttgaaggggcgatggcgattttacgccaggccattaacggcgacctcgactggaaagcaaaacgtcagccgaagctggaaccgctaaaactgagcaagattgaagccgccatgagcttcaccatcgctaaagggatggtcgcgcaaacggcggggaaacattatccggcccccatcaccgcagtaaaaaccattgaagctgcggcccgttttggtcgtgaagaagccttaaacctggaaaacaaaagttttgtcccgctggcgcataccaacgaagcccgcgcactggtcggcattttccttaacgatcaatatgtaaaaggtaaagcgaagaaactcaccaaagatgttgaaaccccgaaacaggccgctgtgctgggcgcaggcattatgggcggcggcatcgcctaccagtctgcgtggaaaggcgtgccggttgtcatgaaagatatcaacgacaagtcgttaaccctcggcatgaccgaagccgcgaaactgctgaacaagcagcttgagcgcggcaagatcgatggtctgaaactggctggcgtgatctccacaattcacccaacgctcgactacgccgggtttgaccgcgtggatgttgtggtagaagcggttgttgaaaacccgaaagtgaaaaaagcagtgctggcagaaaccgagcagaaagtacgcccggataccgtactggcgtctaacacttcaaccattcctatcagcgaactggccaacgcgctggaacgtccggaaaacttctgcgggatgcacttctttaacccggtccaccgaatgccgttagtagaaattattcgcggcgagaaaagctccgacgaaaccatcgcgaaagtcgtcgcctgggcgagcaagatgggcaaaacgccgattgtggttaacgactgccccggcttcttcgtcaaccgtgtactgttcccctatttcgccggtttcagccagttgctgcgcgacggcgcggatttccgcaagatcgacaaagtgatggaaaaacagtttggctggccgatgggtccggcatatctgctggatgttgtgggcattgacaccgcgcatcacgcccagactgtcatggcagcaggcttcccgcagcggatgcagaaagattatcgcgatgccatcgacgcgctnnnnnnnnnnnnnnnnnnnnnnnnnnnnnnnnnnnnnnnnnnnnnnnnnnnnnnnnnnnnnnnnnnnnnnnnnnnnnnnnnnnnnnnnnnnnnnnnnnnnnnnnnnnnnnnnnnnnnnnnnnnnnnnnnnnnnnnnnnnnnnnnnnnnnnnnnnnnnnnnnnnnnnnnnnnnnnnnnnnnnnnnnnnnnnnnnnnnnnnnnnnnnnnnnnnnnnnnnnnnnnnnnnnnnnnnnnnnnnnnnnnnnnnnnnnnnnnnnnnnnnnnnnnnnnnnnnnagacggtatcgccaggcgttgcacaaccggtcatcgcacccgtattcgggcagtgtagcgttaattcgcgaccatcgggtgtgatcacatcggctaaaaaacgtttgtaacgctgaattagcgtcgcgcgctgtagagggggagaaaattccattgcgacaatccttgttattgcgttagcgcccagcgttttagcggcgtgtagcgtgtgcgtccacgggcaaacgaggaggcgtaaagggtgaactccgtcaccgtatacgaccagttaaaacctggcggcgggattgtcaccgcctcgctggcgtcgcgcaataaggtaatatgtggatgaaacggacgattgctttgaaaacaaccgctgcgggcagcctgtgagcggagcntnnnnnnnnnnnnnnnnnnnnnnnnnnnnnnnnnnnnnnnnnnnnnnnnnnnnnnnnnnnnnnnnnnnnnnnnnnnnnnnnnnnnnnnnnnnnnnnnnnnnnnnnnnnnnnnnnnnnnnnnnnnnnnnnnnnnnnnnnnnnnnnnnnnnnnnnnnnnnnnnnnnnnnnnnnnnnnnnnnnnnnnnnnnnnnnnnnnnnnnnnnnnnnnnnnnnnnnnnnnnnnnnnnnnnnnnnnnnnnnnnnnnnnnnnnnnnnnnnnnnnnnnnnnnnnnnnnnnnnnnnnnnnnnnnnnnnnnnnnnnnnnnnnnnnnnnnnnnnnnnnnnnnnnnnnnnnnnnnnnnnnnnnnnnnnnnnnnnnnnnnnnnnnnnnnnnnnnnnnnnnnnnnnnnnnnnnnnnnnnnnnnnnnnnnnnnnnnnnnnnnnnnnnnnnnnnnnnnnnnnnnnnnnnnnnnnnnnnnnnnnnnnnnnnnnnnnnnnnnnnnnnnnnnnnnnnnnnnnnnnnnnnnnnnnnnnnnnnnnnnnnnnnnnnnnnnnnnnnnnnnnnnnnnnnnnnnnnnnnnnnnnnnnnnnnnnnnnnnnnnnnnnnnnnnnnnnnnnnnnnnnnnnnnnnnnnnnnnnnnnnnnnnnnnnnnnnnnnnnnnnnnnnnnnnnnnnnnnnnnnnnnnnnnnnnnnnnnnnnnnnnnnnnnnnnnnnnnnnnnnnnnnnnnnnnnnnnnnnnnnnnnnnnnnnnnnnnnnnnnnnnnnnnnnnnnnnnnnnnnnnnnnnnnnnnnnnnnnnnnnnnnnnnnnnnnnnnnnnnnnnnnnnnnnnnnnnnnnnnnnnnnnnnnnnnnnnnnnnnnnnnnnnnnnnnnnnnnnnnnnnnnnnnnnnnnnnnnnnnnnnnnnnnnnnnnnnnnnnnnnnnnnnnnnnnnnnnnnnnnnnnnnnnnnnnnnnnnnnnnnnnnnnnnnnnnnnnnnnnnnnnnnnnnnnnnnnnnnnnnnnnnnnnnnnnnnnnnnnnnnnnnnnnnnnnnnnnnnnnnnnnnnnnnnnnnnnnnnnnnnnnnnnnnnnnnnnnnnnnnnnnnnnnnnnnnnnnnnnnnnnnnnnnnnnnnnnnnnnnnnnnnnnnnnnnnnnnnnnnnnnnnnnnnnnnnnnnnnnnnnnnnnnnnnnnnnnnnnnnnnnnnnnnnnnnnnnnnnnnnnnnnnnnnnnnnnnnnnnnnnnnnnnnnnnnnnnnnnnnnnnnnnnnnnnnnnnnnnnnnnnnnnnnnnnnnnnnnnnnnnnnnnnnnnnnnnnnnnnnnnnnnnnnnnnnnnnnnnnnnnnnnnnnnnnnnnnnnnnnnnnnnnnnnnnnnnnnnnnnnnnnnnnnnnnnnnnnnnnnnnnnnnnnnnnnnnnnnnnnnnnnnnnnnnnnnnnnnnnnnnnnnnnnnnnnnnnnnnnnnnnnnnnnnnnnnnnnnnnnnnnnnnnnnnnnnnnnnnnnnnnnnnnnnnnnnnnnnnnnnnnnnnnnnnnnnnnnnnnnnnnnnnnnnnnnnnnnnnnnnnnnnnnnnnnnnnnnnnnnnnnnnnnnnnnnnnnnnnnnnnnnnnnnnnnnnnnnnnnnnnnnnnnnnnnnnnnnnnnnnnnnnnnnnnnnnnnnnnnnnnnnnnnnnnnnnnnnnnnnnnnnnnnnnnnnnnnnnnnnnnnnnnnnnnnnnnnnnnnnnnnnnnnnnnnnnnnnnnnnnnnnnnnnnnnnnnnnnnnnnnnnnnnnnnnnnnnnnnnnnnnnnnnnnnnnnnnnnnnnnnnnnnnnnnnnnnnnnnnnnnnnnnnnnnnnnnnnnnnnnnnnnnnnnnnnnnnnnnnnnnnnnnnnnnnnnnnnnnnnnnnnnnnnnnnnnnnnnnnnnnnnnnnnnnnnnnnnnnnnnnnnnnnnnnnnnnnnnnnnnnnnnnnnnnnnnnnnnnnnnnnnnnnnnnnnnnnnnnnnnnnnnnnnnnnnnnnnnnnnnnnnnnnnnnnnnnnnnnnnnnnnnnnnnnnnnnnnnnnnnnnnnnnnnnnnnnnnnnnnnnnnnnnnnnnnnnnnnnnnnnnnnnnnnnnnnnnnnnnnnnnnnnnnnnnnnnnnnnnnnnnnnnnnnnnnnnnnnnnnnnnnnnnnnnnnnnnnnnnnnnnnnnnnnnnnnnnnnnnnnnnnnnnnnnnnnnnnnnnnnnnnnnnnnnnnnnnnnnnnnnnnnnnnnnnnnnnnnnnnnnnnnnnnnnnnnnnnnnnnnnnnnnnnnnnnnnnnnnnnnnnnnnnnnnnnnnnnnnnnnnnnnnnnnnnntcagtgtccagcactggcttgtctgttgcatctgttcccgcaaccacatcagcttttcctgccgggactcagtcatccatttgtcgctgtactgccacaggaagcgggtacctttggcctgacgacgactttcaacagggaggtgcggatgttcattctggcgggttttatcaaccacttcgcccagttgcttcgccacatggaagcgatcgaaggcgattttctcgaccgcattgggtaaatggatacgcgctgctcttatatagcccgcattcatgtccatcgacagtgttttgatggccaacaactgactgtcagtaagcgaacggagatagctggcaagactctctgtgccacgatcatcggttaatgccagtgcccgcccgtcgcgatcagataccacggttatatacctatgcccttttttaaaggcgacttcgtctacattcatatgacgcactgataaaggctttttaatccgcgacaggcctcgcttaaccgcgcgggtcatgatgccgtcaacggcattccagctaagtttaagttgttttctgaccgcatcaacggtgctgattttaagccatgagagcacgaacgattcgaacagcagagtgtaccgactgccggaacctgcccacggtacaggcagagtctggcagccatgctccgggcacataacgcggggaacatcggcttctactaatgtcatgaactggcaggtatcaaggtggcgccatttacgatgtcggtgatcgtgaacagaacaggatttcctgcaggtcggacaggttaactgagtattttcagcaattccgactgtaacagtaacggaacctgcattttcatcgagggtaagggatttaacctgccatggtgcagtcaggttaaggatatgggcatagagggatttttcgtccatataatttcattctgaagcttactttaaactgatattattattttttgcccactttcttaatcttccattagcgttggcgtaaggcgaagatgtgttaaatgagatcattctccccatcgtccattttgtgtaccatggtcttccatacaaaatatcatcggtacgatcattaataaggttcacaatctcattttttacagtctgaagttcagctactaacaactcataacttaactcactgtaatctgagtaaaatttttgagcaagaaggccaagctgattccatttatagccagtttccggaaaatcgacaggcagacctttagcatcagaagcgatccactttacaacaagagcattccatccaagcagatacgaaacgagatcacgaacactcatctccgttcctttggcgtgtccgtccattgatttatctgaagtaatttctggtgggattgtgttgaggtaactaattaatttactaaaatttttatcaatagctaaaagcagttcagcttttgtttgcggcacactcataagaattccctctcatgtaaaaagagacaccataaaggtactgtgtggtgtttgaaaatcactcaattatgtaccacccaccacaacaggggaagacccnnnnnnnnnnnnnnnnnnnnnnnnnnnnnnnnnnnnnnnnnnnnnnnnnnnnnnnnnnnnnnnnnnnnnnnnnnnnnnnnnnnnnnnnnnnnnnnnnnnnnnnnnnnnnnnnnnnnnnnnnnnnnnnnnnnnnnnnnnnnnnnnnnnnnnnnnnnnnnnnnnnnnnnnnnnnnnnnnnnnnnnnnnnnnnnnnnnnnnnnnnnnnnnnnnnnnnnnnnnnnnnnnnnnnnnnnnnnnnnnnnnnnnnnnnnnnnnnnnnnnnnnnnnnnnnnnnnnnnnnnnnnnnnnnnnnnnnnnnnnnnnnnnnnnnnnnnnnnnnnnnnnnnnnnnnnnnnnnnnnnnnnnnnnnnnnnnnnnnnnnnnnnnnnnnnnnnnnnnnnnnnnnnnnnnnnnnnnnnnnnnnnnnnnnnnnnnnnnnnnnnnnnnnnnnnnnnnnnnnnnnnnnnnnnnnnnnnnnnnnnnnnnnnnnnnnnnnnnnnnnnnnnnnnnnnnnnnnnnnnnnnnnnnnnnnnnnnnnnnnnnnnnnnnnnnnnnnnnnnnnnnnnnnnnnnnnnnnnnnnnnnnnnnnnnnnnnnnnnnnnnnnnnnnnnnnnnnnnnnnnnnnnnnnnnnnnnnnnnnnnnnnnnnnnnnnnnnnnnnnnnnnnnnnnnnnnnnnnnnnnnnnnnnnnnnnnnnnnnnnnnnnnnnnnnnnnnnnnnnnnnnnnnnnnnnnnnnnnnnnnnnnnnnnnnnnnnnnnnnnnnnnnnnnnnnnnnnnnnnnnnnnnnnnnnnnnnnnnnnnnnnnnnnnnnnnnnnnnnnnnnnnnnnnnnnnnnnnnnnnnnnnnnnnnnnnnnnnnnnnnnnnnnnnnnnnnnnnnnnnnnnnnnnnnnnnnnnnnnnnnnnnnnnnnnnnnnnnnnnnnnnnnnnnnnnnnnnnnnnnnnnnnnnnnnnnnnnnnnnnnnnnnnnnnnnnnnnnnnnnnnnnnnnnnnnnnnnnnnnnnnnnnnnnnnnnnnnnnnnnnnnnnnnnnnnnnnnnnnnnnnnnnnnnnnnnnnnnnnnnnnnnnnnnnnnnnnnnnnnnnnnnnnnnnnnnnnnnnnnnnnnnnnnnnnnnnnnnnnnnnnnnnnnnnnnnnnnnnnnnnnnnnnnnnnnnnnnnnnnnnnnnnnnnnnnnnnnnnnnnnnnnnnnnnnnnnnnnnnnnnnnnnnnnnnnnnnnnnnnnnnnnnnnnnnnnnnnnnnnnnnnnnnnnnnnnnnnnnnnnnnnnnnnnnnnnnnnnnnnnnnnnnnnnnnnnnnnnnnnnnnnnnnnnnnnnnnnnnnnnnnnnnnnnnnnnnnnnnnnnnnnnnnnnnnnnnnnnnnnnnnnnnnnnnnnnnnnnnnnnnnnnnnnnnnnnnnnnnnnnnnnnnnnnnnnnnnnnnnnnnnnnnnnnnnnnnnnnnnnnnnnnnnnnnnnnnnnnnnnnnnnnnnnnnnnnnnnnnnnnnnnnnnnnnnnnnnnnnnnnnnnnnnnnnnnnnnnnnnnnnnnnnnnnnnnnnnnnnnnnnnnnnnnnnnnnnnnnnnnnnnnnnnnnnnnnnnnnnnnnnnnnnnnnnnnnnnnnnnnnnnnnnnnnnnnnnnnnnnnnnnnnnnnnnnnnnnnnnnnnnnnnnnnnnnnnnnnnnnnnnnnnnnnnnnnnnnnnnnnnnnnnnnnnnnnnnnnnnnnnnnnnnnnnnnnnnnnnnnnnnnnnnnnnnnnnnnnnnnnnnnnnnnnnnnnnnnnnnnnnnnnnnnnnnnnnnnnnnnnnnnnnnnnnnnnnnnnnnnnnnnnnnnnnnnnnnnnnnnnnnnnnnnnnnnnnnnnnnnnnnnnnnnnnnnnnnnnnnnnnnnnnnnnnnnnnnnnnnnnnnnnnnnnnnnnnnnnnnnnnnnnnnnnnnnnnnnnnnnnnnnnnnnnnnnnnnnnnnnnnnnnnnnnnnnnnnnnnnnnnnnnnnnnnnnnnnnnnnnnnnnnnnnnnnnnnnnnnnnnnnnnnnnnnnnnnnnnnnnnnnnnnnnnnnnnnnnnnnnnnnnnnnnnnnnnnnnnnnnnnnnnnnnnnnnnnnnnnnnnnnnnnnnnnnnnnnnnnnnnnnnnnnnnnnnnnnnnnnnnnnnnnnnnnnnnnnnnnnnnnnnnnnnnnnnnnnnnnnnnnnnnnnnnnnnnnnnnnnnnnnnnnnnnnnnnnnnnnnnnnnnnnnnnnnnnnnnnnnnnnnnnnnnnnnnnnnnnnnnnnnnnnnnnnnnnnnnnnnnnnnnnnnnnnnnnnnnnnnnnnnnnnnnnnnnnnnnnnnnnnnnnnnnnnnnnnnnnnnnnnnnnnnnnnnnnnnnnnnnnnnnnnnnnnnnnnnnnnnnnnnnnnnnnnnnnnnnnnnnnnnnnnnnnnnnnnnnnnnnnnnnnnnnnnnnnnnnnnnnnnnnnnnnnnnnnnnnnnnnnnnnnnnnnnnnnnnnnnnnnnnnnnnnnnnnnnnnnnnnnnnnnnnnnnnnnnnnnnnnnnnnnnnnnnnnnnnnnnnnnnnnnnnnnnnnnnnnnnnnnnnnnnnnnnnnnnnnnnnnnnnnnnnnnnnnnnnnnnnnnnnnnnnnnnnnnnnacgccactctgccgacggcgacgggtgacggtctccgttctttcctccataagcgcactcagatttgtttttaccgcgagccgggtctgtaactgactgactgccggaaaactgatttttacggtaaagccctcatcctccaggcgggcattgatgcgaccggcaatgttttctgtggcgtacagggccgtgccacgaaaacctgtttcaatcccgctgacgattttctccagctcaggccggaactgtgcttcagcctcacggtgcaggctggtcacagttgactcaatttcctctatatattcaattgcttccctgcgattatttagtgttatctcggggttttccgggtcaaagtctcgtttcctgtaatctnnncngcccgggttgttgataccggaccattgagaaatctttncccataatccggaccgggaccttcgttgttctgcgtcttcttcctccaacatttgctgttctttgcgtttaccagttctgaaatagtcattcagctcctcttccagtgaggtgcagacccccgtcagtaattcccgggttctggcatcgatctcctccatggccattctgacatcagcggtcacctgctcctgacagtccgcgattttccggatatccgcaagcaggctggtgatattcgcctgcagtgactgaatgctttgctgcagcccctgatggcgtaatgacagatattcgctgacattttctgcattctgcatcagttttgcggcagcagaatcaaccgccagtgccgccgctctggagtgtgaactcagtatgacttccgttatcagttgatcgataagtgagccttcccacaggtctgtcgccccttcagttgccagttcgctgtctttacagacgtaatcttttttcatgcgaccgaaggcttccctgacaaaatcatcgacccaggcttagttctaccttaagggtatattgttactatcacgagttcatgatagttaagtttttagtaaaacacgacatatgacgatacatatattagcaaaattatgacaaatgaggctaccttaacaaaaattcattaatagcaaacacataaataaagactctcctaccaaaaaaacagactcttcactccttcttaactattttcatgagaaataataaacaaggaatttattacctttgaatacaaacttatatatacaatgaacttaaactcttgaatcattatccagagaatatcattaattggtgatgacctagctatgcatggcagcattcatgataatgagtatatactagccagaatgacacaaagagatatttaactaactaatatattgatagtcaatgatgacagatcgtagtaatatattaatacttagccctctgaaatatcaagtcatgtacgatgctcccgttattttaatttcgttctagctgtacttttgaatacaaccataactgattattgccaactgactgaatgaaaaatatcaataaatacaacaaacttactgccttttcgttttatttataagacgttccaactacaagaacaatataggcacatgattattccaacaatactggacaaaaactcccgtatctgaagatacaataggtgataattctttcaggattttgctcaactatggcctgatgggagagtcatgacggaactaaggcctttacaagccagaagattagtcttaatgcgatcacagttcaacttgctacgactgaaatccgtaatagcatataaactctgtttttttaacagaaatgaagatcttcttgttgcataaatgatgcttctctgcctctgaaaaagtaaatataaagtatatttaataagattaatttttatgatagtgataatttatgatggggattcatatggcatatctaaaaggatagattacatgttgaattctacaacatcttcgggaaaaagaaccggcattttagcaattggtgcccatcctgatgatatagaattaggatgtggtgcatctctttcatattattctaatgaaaaagtatatattatatctgttgtcatgacacctggttgctgtggcgcagagtatattgatcgtcacaaggaatcacaagaagcattaaatatgttaggatgcaataaactaatccctctaaattttgaagataccagattatatttgcaaataaaagagatgatatcatctctggaatacataattgagaatgaaacgccccaggatgtggaaattactcgagtttacaccatgaataatactgacaggcatcaggatcacattgctgtttatcaggcatcaatggttgcctgtcgttatattcctcaaatactaggatacgaaacaccaagtacatgtctgtcatttttacctcaagtttttgaatctgtagatgaggtccattttaataaaaaaatattagcattacaaaagcataaaagccagatccatcgaagatacatacagccagaatacataattgctcaagccaaattccgaggacaacaggttagtcattctatgtgtgaaggttttgttgtccataagatggtgttgtaacggagtaatagaaatgaaaactttgttatttatcttcatgaccatagcaatgttgctatggtttttaagtacgctaagacgtaaaccctgtcaaaagaaaggctgtattgacgccattataccagcttataacgaaggcccgtgtctggcgcagtcactggataatctgctgcgtaacccttatttttgccgggtaatttgcgttaacgacggatccacggacaataccgaagcggtcatggcggaagtcaaacgcaaatggggcgaccgctttgttgccgtcacgcaaaaaaacaccggtaaaggtggcgcactaatgcatggactaaaatacgccacgtgtgatcaagtatttttaagtgatgcagatactttcgttccacctgataatgatggaatgggctatatgctggcagaaattgagcgcggcgctgatgccgttggcggaattccctccaccgcgttaaaaggggcaggtctgctgccacatatccgcgccaccgtaaagttgccgatgattgttatgaagcgcacgctacagcagtttctgggcggtgcaccgtttattatcagcggtgcctgcgggatgttccgtactgatgtattgcgtaagttcggtttctctgatcgtactaaagtcgaagaccttgatctcacctggacgttggtggcaaacggctaccgtattcggcaggcgaatcgctgcatcgtatacccacaggaatgtaacagtccgcgtgaggagtggcgccgctggcggcgttggattgtgggctacgcggtctgtatgcgcctgcataaaagacttttatttagccgcttcggtatcttcagtatatttcctatgctgttggttgtgctttatggcgttggtatttatctcactacctggtttaatgaattcatcaccaccgggccacatggtgtggtgttggcaatgttcccgcttatctgggtcggcgtagtttgtgttattggtgcatttagcgcctggtttcatcgttgctggttgttggtgcctttagcaccgctttccgttgtgtatgtattattagcttatgccatctggattatttatggacttattgccttttttactggacgcgaacctcagcgcgacaaacccacccgctattccgcactggtggaagcgtcaaccgcttattcccaaccttctgtcacaggaactgaaaaactatctgaagcttaatgctaaagagaaaaatgttcagattgcagaccaggtgattattgatgaaagtgccggtgaggttgttatcggcgcgaatacccgtatttgccacggtgccgttattcaggggccggtagtgattggcgcaaactgcctgataggtaattatgcgtttattcgtcctggcacaataatcagcaatggcgtaaaaattggttttgccaccgaaattaaaaatgcggttattgaagcggaagcaacgattggtccgcaatgctttattgccgactcggtagttgcaaaccaggcatatttgggcgcacaagtacgtaccagtaatcatcgtctggatgaacaacccgtgtctgttcgaactccagagggaattatcgctaccggatgcgataaattaggttgttatatcgggaagcgttcacgccttggtgtacaagttattattttgcctgggcgaattatttctccgaacacacaacttggcccgcgcgtgattgtagaacgtaatttacctagtggaacttactcactccgacaagaacttatccgtacaggagattaaaatgataaagcatacgttattagtgccgtttttttttagtgcattgcccgcttatgccgggttaacttccattaccgcgggctacgattttaccgattattctggcgaacatggcaaccgtaatttagcgtatgctgaactggtagcaaaagttgaaaacgcaacgctgctttttaatctttcccaggggcgtcgtgattatgaaactgaacatttcaatgccactcgcggccagggtgcagtctggtacaaatggaataactggctgacaacccgaacgggtattgcctttgcggataatacgccggtctttgcccgccaggattttcgacaggatattaacctagccctgttgccaaaaacgcttttcacgaccggttatcgctacactaaatattacgatgatgtcgaagtcaatgcctggcaaggcggcgtatcactctatactggcccggtgatcaccagttaccgctatacccattatgactccagcgatgcaggtagtagttatagcaatatgatttccgtgcgtctgaaggacccgcgcggtgctggttatacgcaactatggctaagccgcggaacaggtgcttacacctacgactggacgccagaaacacgctacggcagcatgaagagcatcagtttgcaacgaattcaaccgctgactgagcaacttaatctcgggttgacggcaggtaaagtgtggttcaacaccccaaccgatgattataacggtctgcaacttgcagcccacctgatctggaaattctaggcagcagtctatcagtatattttattcggtagnnnnnnnnnnnnnnnnnnnnnnnnnnnnnnnnnnnnnnnnnnnnnnnnnnnnnnnnnnnnnnnnnnnnnnnnnnnnnnnnnnnnnnnnnnnnnnnnnnnnnnnnnnnnnnnnnnnnnnnnnnnnnnnnnnnnnnnnnnnnnnnnnnnnnnnnnnnnnnnnnnnnnnnnnnnnnnnnnnnnnnnnnnnnnnnnnnnnnnnncnnnnnnnnnnnnnnnnnnnnnnnnnnnnnnnnnnnnnnnnnnnnnnnnnnnnnnnnnnnnnnnnnnnnnnnnnnnnnnnnnnnnnnnnnnnnnnnnnnnnnnnnnnnnnnnnnnnnnnnnnnnnnnnnnnnnnnnnnnnnnnnnnnnnnnnnnnnnnnnnnnnnnnnnnnnnnnnnnnnnnnnnnnnnnnnnnnnnnnnnnnnnnnnnnnnnnnnnnnnnnnnnnnnnnnnnnnnnnnnnnnnnnnnnnnnnnnnnnnnnnnnnnnnnnnnnnnnnnnnnnnnnnnnnnnnnnnnnnnnnnnnnnnnnnnnnnnnnnnnnnnnnnnnnnnnnnnnnnnnnnnnnnnnnnnnnnnnnnnnnnnnnnnnnnnnnnnnnnnnnnnnnnnnnnnnnnnnnnnnnnnnnnnnnnnnnnnnnnnnnnnnnnnnnnnnnnnnnnnnnnnnnnnnnnnnnnnnnnnnnnnnnnnnnnnnnnnnnnnnnnnnnnnnnnnnnnnnnnnnnnnnnnnnnnnnnnnnnnnnnnnnnnnnnnnnnnnnnnnnnnnnnnnnnnnnnnnnnnnnnnnnnnnnnnnnnnnnnnnnnnnnnnnnnnnnnnnnnnnnnnnnnnnnnnnnnnnnnnnnnnnnnnnnnnnnnnnnnnnnnnnnnnnnnnnnnnnnnnnnnnnnnnnnnnnnnnnnnnnnnnnnnnnnnnnnnnnnnnnnnnnnnnnnnnnnnnnnnnnnnnnnnnnnnnnnnnnnnnnnnnnnnnnnnnnnnnnnnnnnnnnnnnnnnnnnnnnnnnnnnnnnnnnnnnnnnnnnnnnnnnnnnnnnnnnnnnnnnnnnnnnnnnnnnnnnnnnnnnnnnnnnnnnnnnnnnnnnnnnnnnnnnnnnnnnnnnnnnnnnnnnnnnnnnnnnnnnnnnnnnnnnnnnnnnnnnnnnnnnnnnnnnnnnnnnnnnnnnnnnnnnnnnnnnnnnnnnnnnnnnnnnnnnnnnnnnnnnnnnnnnnnnnnnnnnnnnnnnnnnnnnnnnnnnnnnnnnnnnnnnnnnnnnnnnnnnnnnnnnnnnnnnnnnnnnnnnnnnnnnnnnnnnnnnnnnnnnnnnnnnnnnnnnnnnnnnnnnnnnnnnnnnnnnnnnnnnnnnnnnnnnnnnnnnnnnnnnnnnnnnnnnnnnnnnnnnnnnnnnnnnnnnnnnnnnnnnnnnnnnnnnnnnnnnnnnnnnnnnnnnnnnnnnnnnnnnnnnnnnnnnnnnnnnnnnnnnnnnnnnnnnnnnnnnnnnnnnnnnnnnnnnnnnnnnnnnnnnnnnnnnnnnnnnnnnnnnnnnnnnnnnnnnnnnnnnnnnnnnnnnnnnnnnnnnnnnnnnnnnnnnnnnnnnnnnnnnnnnnnnnnnnnnnnnnnnnnnnnnnnnnnnnnnnnnnnnnnnnnnnnnnnnnnnnnnnnnnnnnnnnnnnnnnnnnnnnnnnnnnnnnnnnnnnnnnnnnnnnnnnnnnnnnnnnnnnnnnnnnnnnnnnnnnnnnnnnnnnnnnnnnnnnnnnnnnnnnnnnnnnnnnnnnnnnnnnnnnnnnnnnnnnnnnnnnnnnnnnnnnnnnnnnnnnnnnnnnnnnnnnnnnnnnnnnnnnnnnnnnnnnnnnnnnnnnnnnnnnnnnnnnnnnnnnnnnnnnnnnnnnnnnnnnnnnnnnnnnnnnnnnnnnnnnnnnnnnnnnnnnnnnnnnnnnnnnnnnnnnnnnnnnnnnnnnnnnnnnnnnnnnnnnnnnnnnnnnnnnnnnnnnnnnnnnnnnnnnnnnnnnnnnnnnnnnnnnnnnnnnnnnnnnnnnnnnnnnnnnnnnnnnnnnnnnnnnnnnnnnnnnnnnnnnnnnnnnnnnnnnnnnnnnnnnnnnnnnnnnnnnnnnnnnnnnnnnnnnnnnnnnnnnnnnnnnnnnnnnnnnnnnnnnnnnnnnnnnnnnnnnnnnnnnnnnnnnnnnnnnnnnnnnnnnnnnnnnnnnnnnnnnnnnnnnnnnnnnnnnnnnnnnnnnnnnnnnnnnnnnnnnnnnnnnnnnnnnnnnnnnnnnnnnnnnnnnnnnnnnnnnnnnnnnnnnnnnnnnnnnnnnnnnnnnnnnnnnnnnnnnnnnnnnnnnnnnnnnnnnnnnnnnnnnnnnnnnnnnnnnnnnnnnnnnnnnnnnnnnnnnnnnnnnnnnnnnnnnnnnnnnnnnnnnnnnnnnnnnnnnnnnnnnnnnnnnnnnnnnnnnnnnnnnnnnnnnnnnnnnnnnnnnnnnnnnnnnnnnnnnnnnnnnnnnnnnnnnnnnnnnnnnnnnnnnnnnnnnnnnnnnnnnnnnnnnnnnnnnnnnnnnnnnnnnnnnnnnnnnnnnnnnnnnnnnnnnnnnnnnnnnnnnnnnnnnnnnnnnnnnnnnnnnnnnnnnnnnnnnnnnnnnnnnnnnnnnnnnnnnnnnnnnnnnnnnnnnnnnnnnnnnnnnnnnnnnnnnnnnnnnnnnnnnnnnnnnnnnnnnnnnnnnnnnnnnnnnnnnnnnnnnnnnnnnnnnnnnnnnnnnnnnnnnnnnnnnnnnnnnnnnnnnnnnnnnnnnnnnnnnnnnnnnnnnnnnnnnnnnnnnnnnnnnnnnnnnnnnnnnnnnnnnnnnnnnnnnnnnnnnnnnnnnnnnnnnnnnnnnnnnnnnnnnnnnnnnnnnnnnnnnnnnnnnnnnnnnnnnnnnnnnnnnnnnnnnnnnnnnnnnnnnnnnnnnnnnnnnnnnnnnnnnnnnnnnnnnnnnnnnnnnnnnnnnnnnnnnnnnnnnnnnnnnnnnnnnnnnnnnnnnnnnnnnnnnnnnnnnnnnnnnnnnnnnnnnnnnnnnnnnnnnnnnnnnnnnnnnnnnnnnnnnnnnnnnnnnnnnnnnnnnnnnnnnnnnnnnnnnnnnnnnnnnnnnnnnnnnnnnnnnnnnnnnnnnnnnnnnnnnnnnnnnnnnnnnnnnnnnnnnnnnnnnnnnnnnnnnnnnnnnnnnnnnnnnnnnnnnnnnnnnnnnnnnnnnnnnnnnnnnnnnnnnnnnnnnnnnnnnnnnnnnnnnnnnnnnnnnnnnnnnnnnnnnnnnnnnnnnnnnnnnnnnnnnnnnnnnnnnnnnnnnnnnnnnnnnnnnnnnnnnnnnnnnnnnnnnnnnnnnnnnnnnnnnnnnnnnnnnnnnnnnnnnnnnnnnnnnnnnnnnnnnnnnnnnnnnnnnnnnnnnnnnnnnnnnnnnnnnnnnnnnnnnnnnnnnnnnnnnnnnnnnnnnnnnnnnnnnnnnnnnnnnnnnnnnnnnnnnnnnnnnnnnnnnnnnnnnnnnnnnnnnnnnnnnnnnnnnnnnnnnnnnnnnnnnnnnnnnnnnnnnnnnnnnnnnnnnnnnnnnnnnnnnnnnnnnnnnnnnnnnnnnnnnnnnnnnnnnnnnnnnnnnnnnnnnnnnnnnnnnnnnnnnnnnnnnnnnnnnnnnnnnnnnnnnnnnnnnnnnnnnnnnnnnnnnnnnnnnnnnnnnnnnnnnnnnnnnnnnnnnnnnnnnnnnnnnnnnnnnnnnnnnnnnnnnnnnnnnnnnnnnnnnnnnnnnnnnnnnnnnnnnnnnnnnnnnnnnnnnnnnnnnnnnnnnnnnnnnnnnnnnnnnnnnnnnnnnnnnnnnnnnnnnnnnnnnnnnnnnnnnnnnnnnnnnnnnnnnnnnnnnnnnnnnnnnnnnnnnnnnnnnnnnnnnnnnnnnnnnnnnnnnnnnnnnnnnnnnnnnnnnnnnnnnnnnnnnnnnnnnnnnnnnnnnnnnnnnnnnnnnnnnnnnnnnnnnnnnnnnnnnnnnnnnnnnnnnnnnnnnnnnnnnnnnnnnnnnnnnnnnnnnnnnnnnnnnnnnnnnnnnnnnnnnnnnnnnnnnnnnnnnnnnnnnnnnnnnnnnnnnnnnnnnnnnnnnnnnnnnnnnnnnnnnnnnnnnnnnnnnnnnnnnnnnnnnnnnnnnnnnnnnnnnnnnnnnnnnnnnnnnnnnnnnnnnnnnnnnnnnnnnnnnnnnnnnnnnnnnnnnnnnnnnnnnnnnnnnnnnnnnnnnnnnnnnnnnnnnnnnnnnnnnnnnnnnnnnnnnnnnnnnnnnnnnnnnnnnnnnnnnnnnnnnnnnnnnnnnnnnnnnnnnnnnnnnnnnnnnnnnnnnnnnnnnnnnnnnnnnnnnnnnnnnnnnnnnnnnnnnnnnnnnnnnnnnnnnnnnnnnnnnnnnnnnnnnnnnnnnnnnnnnnnnnnnnnnnnnnnnnnnnnnnnnnnnnnnnnnnnnnnnnnnnnnnnnnnnnnnnnnnnnnnnnnnnnnnnnnnnnnnnnnnnnnnnnnnnnnnnnnnnnnnnnnnnnnnnnnnnnnnnnnnnnnnnnnnnnnnnnnnnnnnnnnnnnnnnnnnnnnnnnnnnnnnnnnnnnnnnnnnnnnnnnnnnnnnnnnnnnnnnnnnnnnnnnnnnnnnnnnnnnnnnnnnnnnnnnnnnnnnnnnnnnnnnnnnnnnnnnnnnnnnnnnnnnnnnnnnnnnnnnnnnnnnnnnnnnnnnnnnnnnnnnnnnnnnnnnnnnnnnnnnnnnnnnnnnnnnnnnnnnnnnnnnnnnnnnnnnnnnnnnnnnnnnnnnnnnnnnnnnnnnnnnnnnnnnnnnnnnnnnnnnnnnnnnnnnnnnnnnnnnnnnnnnnnnnnnnnnnnnnnnnnnnnnnnnnnnnnnnnnnnnnnnnnnnnnnnnnnnnnnnnnnnnnnnnnnnnnnnnnnnnnnnnnnnnnnnnnnnnnnnnnnnnnnnnnnnnnnnnnnnnnnnnnnnnnnnnnnnnnnnnnnnnnnnnnnnnnnnnnnnnnnnnnnnnnnnnnnnnnnnnnnnnnnnnnnnnnnnnnnnnnnnnnnnnnnnnnnnnnnnnnnnnnnnnnnnnnnnnnnnnnnnnnnnnnnnnnnnnnnnnnnnnnnnnnnnnnnnnnnnnnnnnnnnnnnnnnnnnnnnnnnnnnnnnnnnnnnnnnnnnnnnnnnnnnnnnnnnnnnnnnnnnnnnnnnnnnnnnnnnnnnnnnnnnnnnnnnnnnnnnnnnnnnnnnnnnnnnnnnnnnnnnnnnnnnnnnnnnnnnnnnnnnnnnnnnnnnnnnnnnnnnnnnnnnnnnnnnnnnnnnnnnnnnnnnnnnnnnnnnnnnnnnnnnnnnnnnnnnnnnnnnnnnnnnnnnnnnnnnnnnnnnnnnnnnnnnnnnnnnnnnnnnnnnnnnnnnnnnnnnnnnnnnnnnnnnnnnnnnnnnnnnnnnnnnnnnnnnnnnnnnnnnnnnnnnnnnnnnnnnnnnnnnnnnnnnnnnnnnnnnnnnnnnnnnnnnnnnnnnnnnnnnnnnnnnnnnnnnnnnnnnnnnnnnnnnnnnnnnnnnnnnnnnnnnnnnnnnnnnnnnnnnnnnnnnnnnnnnnnnnnnnnnnnnnnnnnnnnnnnnnnnnnnnnnnnnnnnnnnnnnnnnnnnnnnnnnnnnnnnnnnnnnnnnnnnnnnnnnnnnnnnnnnnnnnnnnnnnnnnnnnnnnnnnnnnnnnnnnnnnnnnnnnnnnnnnnnnnnnnnnnnnnnnnnnnnnnnnnnnnnnnnnnnnnnnnnnnnnnnnnnnnnnnnnnnnnnnnnnnnnnnnnnnnnnnnnnnnnnnnnnnnnnnnnnnnnnnnnnnnnnnnnnnnnnnnnnnnnnnnnnnnnnnnnnnnnnnnnnnnnnnnnnnnnnnnnnnnnnnnnnnnnnnnnnnnnnnnnnnnnnnnnnnnnnnnnnnnnnnnnnnnnnnnnnnnnnnnnnnnnnnnnnnnnnnnnnnnnnnnnnnnnnnnnnnnnnnnnnnnnnnnnnnnnnnnnnnnnnnnnnnnnnnnnnnnnnnnnnnnnnnnnnnnnnnnnnnnnnnnnnnnnnnnnnnnnnnnnnnnnnnnnnnnnnnnnnnnnnnnnnnnnnnnnnnnnnnnnnnnnnnnnnnnnnnnnnnnnnnnnnnnnnnnnnnnnnnnnnnnnnnnnnnnnnnnnnnnnnnnnnnnnnnnnnnnnnnnnnnnnnnnnnnnnnnnnnnnnnnnnnnnnnnnnnnnnnnnnnnnnnnnnnnnnnnnnnnnnnnnnnnnnnnnnnnnnnnnnnnnnnnnnnnnnnnnnnnnnnnnnnnnnnnnnnnnnnnnnnnnnnnnnnnnnnnnnnnnnnnnnnnnnnnnnnnnnnnnnnnnnnnnnnnnnnnnnnnnnnnnnnnnnnnnnnnnnnnnnnnnnnnnnnnnnnnnnnnnnnnnnnnnnnnnnnnnnnnnnnnnnnnnnnnnnnnnnnnnnnnnnnnnnnnnnnnnnnnnnnnnnnnnnnnnnnnnnnnnnnnnnnnnnnnnnnnnnnnnnnnnnnnnnnnnnnnnnnnnnnnnnnnnnnnnnnnnnnnnnnnnnnnnnnnnnnnnnnnnnnnnnnnnnnnnnnnnnnnnnnnnnnnnnnnnnnnnnnnnnnnnnnnnnnnnnnnnnnnnnnnnnnnnnnnnnnnnnnnnnnnnnnnnnnnnnnnnnnnnnnnnnnnnnnnnnnnnnnnnnnnnnnnnnnnnnnnnnnnnnnnnnnnnnnnnnnnnnnnnnnnnnnnnnnnnnnnnnnnnnnnnnnnnnnnnnnnnnnnnnnnnnnnnnnnnnnnnnnnnnnnnnnnnnnnnnnnnnnnnnnnnnnnnnnnnnnnnnnnnnnnnnnnnnnnnnnnnnnnnnnnnnnnnnnnnnnnnnnnnnnnnnnnnnnnnnnnnnnnnnnnnnnnnnnnnnnnnnnnnnnnnnnnnnnnnnnnnnnnnnnnnnnnnnnnnnnnnnnnnnnnnnnnnnnnnnnnnnnnnnnnnnnnnnnnnnnnnnnnnnnnnnnnnnnnnnnnnnnnnnnnnnnnnnnnnnnnnnnnnnnnnnnnnnnnnnnnnnnnnnnnnnnnnnnnnnnnnnnnnnnnnnnnnnnnnnncaggtcgacgccggtgatcagctcggtgaccgggtgttcgacctggatacgggtgttcatttcgatgaaatagaactcgccgttttcatacaggaactcgaacgtgccggcgccacggtagcccatcttgcggcaggcgtcggcgcagcggtcgccgatgcgctcgatcaggcggcgcgcgatgccgggggccggcgcttcctcgatgaccttctggtggcggcgctgcatggagcagtcgcgttcnnnnnnnnnnnnnnnnnnnnnnnnnnnnnnnnnnnnnnnnnnnnnnnnnnnnnnnnnnnnnnnnnnnnnnnnnnnnnnnnnnnnnnnnnnnnnnnnnnnnnnnnnnnnnnnnnnnnnnnnnnnnnnnnnnnnnnnnnnnnnnnnnnnnnnnnnnnnnnnnnnnnnnnnnnnnnnnnnnnnnnnnnnnnnnnnnnnnnnnnnnnnnnnnnnnnnnnnnnnnnnnnnnnnnnnnnnnnnnnnnnnnnnnnnnnnnnnnnnnnnnnnnnnnnnnnnnnnnnnnnnnnnnnnnnnnnnnnnnnnnnnnnnnnnnnnnnnnnnnnnnnnnnnnnnnnnnnnnnnnnnnnnnnnnnnnnnnnnnnnnnnnnnnnnnnnnnnnnnnnnnnnnnnnnnnnnnnnnnnnnnnnnnnnnnnnnnnnnnnnnnnnnnnnnnnnnnnnnnnnnnnnnnnnnnnnnnnnnnnnnnnnnnnnnnnnnnnnnnnnnnnnnnnnnnnnnnnnnnnnnnnnnnnnnnnnnnnnnnnnnnnnnnnnnnnnnnnnnnnnnnnnnnnnnnnnnnnnnnnnnnnnnnnnnnnnnnnnnnnnnnnnnnnnnnnnnnnnnnnnnnnnnnnnnnnnnnnnnnnnnnnnnnnnnnnnnnnnnnnnnnnnnnnnnnnnnnnnnnnnnnnnnnnnnnnnnnnnnnnnnnnnnnnnnnnnnnnnnnnnnnnnnnnnnnnnnnnnnnnnnnnnnnnnnnnnnnnnnnnnnnnnnnnnnnnnnnnnnnnnnnnnnnnnnnnnnnnnnnnnnnnnnnnnnnnnnnnnnnnnnnnnnnnnnnnnnnnnnnnnnnnnnnnnnnnnnnnnnnnnnnnnnnnnnnnnnnnnnnnnnnnnnnnnnnnnnnnnnnnnnnnnnnnnnnnnnnnnnnnnnnnnnnnnnnnnnnnnnnnnnnnnnnnnnnnnnnnnnnnnnnnnnnnnnnnnnnnnnnnnnnnnnnnnnnnnnnnnnnnnnnnnnnnnnnnnnnnnnnnnnnnnnnnnnnnnnnnnnnnnnnnnnnnnnnnnnnnnnnnnnnnnnnnnnnnnnnnnnnnnnnnnnnnnnnnnnnnnnnnnnnnnnnnnnnnnnnnnnnnnnnnnnnnnnnnnnnnnnnnnnnnnnnnnnnnnnnnnnnnnnnnnnnnnnnnnnnnnnnnnnnnnnnnnnnnnnnnnnnnnnnnnnnnnnnnnnnnnnnnnnnnnnnnnnnnnnnnnnnnnnnnnnnnnnnnnnnnnnnnnnnnnnnnnnnnnnnnnnnnnnnnnnnnnnnnnnnnnnnnnnnnnnnnnnnnnnnnnnnnnnnnnnnnnnnnnnnnnnnnnnnnnnnnnnnnnnnnnnnnnnnnnnnnnnnnnnnnnnnnnnnnnnnnnnnnnnnnnnnnnnnnnnnnnnnnnnnnnnnnnnnnnnnnnnnnnnnnnnnnnnnnnnnnnnnnnnnnnnnnnnnnnnnnnnnnnnnnnnnnnnnnnnnnnnnnnnnnnnnnnnnnnnnnnnnnnnnnnnnnnnnnnnnnnnnnnnnnnnnnnnnnnnnnnnnnnnnnnnnnnnnnnnnnnnnnnnnnnnnnnnnnnnnnnnnnnnnnnnnnnnnnnnnnnnnnnnnnnnnnnnnnnnnnnnnnnnnnnnnnnnnnnnnnnnnnnnnnnnnnnnnnnnnnnnnnnnnnnnnnnnnnnnnnnnnnnnnnnnnnnnnnnnnnnnnnnnnnnnnnnnnnnnnnnnnnnnnnnnnnnnnnnnnnnnnnnnnnnnnnnnnnnnnnnnnnnnnnnnnnnnnnnnnnnnnnnnnnnnnnnnnnnnnnnnnnnnnnnnnnnnnnnnnnnnnnnnnnnnnnnnnnnnnnnnnnnnnnnnnnnnnnnnnnnnnnnnnnnnnnnnnnnnnnnnnnnnnnnnnnnnnnnnnnnnnnnnnnnnnnnnnnnnnnnnnnnnnnnnnnnnnnnnnnnnnnnnnnnnnnnnnnnnnnnnnnnnnnnnnnnnnnnnnnnnnnnnnnnnnnnnnnnnnnnnnnnnnnnnnnnnnnnnnnnnnnnnnnnnnnnnnnnnnnnnnnnnnnnnnnnnnnnnnnnnnnnnnnnnnnnnnnnnnnnnnnnnnnnnnnnnnnnnnnnnnnnnnnnnnnnnnnnnnnnnnnnnnnnnnnnnnnnnnnnnnnnnnnnnnnnnnnnnnnnnnnnnnnnnnnnnnnnnnnnnnnnnnnnnnnnnnnnnnnnnnnnnnnnnnnnnnnnnnnnnnnnnnnnnnnnnnnnnnnnnnnnnnnnnnnnnnnnnnnnnnnnnnnnnnnnnnnnnnnnnnnnnnnnnnnnnnnnnnnnnnnnnnnnnnnnnnnnnnnnnnnnnnnnnnnnnnnnnnnnnnnnnnnnnnnnnnnnnnnnnnnnnnnnnnnnnnnnnnnnnnnnnnnnnnnnnnnnnnnnnnnnnnnnnnnnnnnnnnnnnnnnnnnnnnnnnnnnnnnnnnnnnnnnnnnnnnnnnnnnnnnnnnnnnnnnnnnnnnnnnnnnnnnnnnnnnnnnnnnnnnnnnnnnnnnnnnnnnnnnnnnnnnnnnnnnnnnnnnnnnnnnnnnnnnnnnnnnnnnnnnnnnnnnnnnnnnnnnnnnnnnnnnnnnnnnnnnnnnnnnnnnnnnnnnnnnnnnnnnnnnnnnnnnnnnnnnnnnnnnnnnnnnnnnnnnnnnnnnnnnnnnnnnnnnnnnnnnnnnnnnnnnnnnnnnnnnnnnnnnnnnnnnnnnnnnnnnnnnnnnnnnnnnnnnnnnnnnnnnnnnnnnnnnnnnnnnnnnnnnnnnnnnnnnnnnnnnnnnnnnnnnnnnnnnnnnnnnnnnnnnnnnnnnnnnnnnnnnnnnnnnnnnnnnnnnnnnnnnnnnnnnnnnnnnnnnnnnnnnnnnnnnnnnnnnnnnnnnnnnnnnnnnnnnnnnnnnnnnnnnnnnnnnnnnnnnnnnnnnnnnnnnnnnnnnnnnnnnnnnnnnnnnnnnnnnnnnnnnnnnnnnnnnnnnnnnnnnnnnnnnnnnnnnnnnnnnnnnnnnnnnnnnnnnnnnnnnnnnnnnnnnnnnnnnnnnnnnnnnnnnnnnnnnnnnnnnnnnnnnnnnnnnnnnnnnnnnnnnnnnnnnnnnnnnnnnnnnnnnnnnnnnnnnnnnnnnnnnnnnnnnnnnnnnnnnnnnnnnnnnnnnnnnnnnnnnnnnnnnnnnnnnnnnnnnnnnnnnnnnnnnnnnnnnnnnnnnnnnnnnnnnnnnnnnnnnnnnnnnnnnnnnnnnnnnnnnnnnnnnnnnnnnnnnnnnnnnnnnnnnnnnnnnnnnnnnnnnnnnnnnnnnnnnnnnnnnnnnnnnnnnnnnnnnnnnnnnnnnnnnnnnnnnnnnnnnnnnnnnnnnnnnnnnnnnnnnnnnnnnnnnnnnnnnnnnnnnnnnnnnnnnnnnnnnnnnnnnnnnnnnnnnnnnnnnnnnnnnnnnnnnnnnnnnnnnnnnnnnnnnnnnnnnnnnnnnnnnnnnnnnnnnnnnnnnnnnnnnnnnnnnnnnnnnnnnnnnnnnnnnnnnnnnnnnnnnnnnnnnnnnnnnnnnnnnnnnnnnnnnnnnnnnnnnnnnnnnnnnnnnnnnnnnnnnnnnnnnnnnnnnnnnnnnnnnnnnnnnnnnnnnnnnnnnnnnnnnnnnnnnnnnnnnnnnnnnnnnnnnnnnnnngggatcgctgtgcgtgcctatggtnggcgcttgatctgcgatagcacaacgccgtcagtcgagccatcagtggaagataaaagcgcgctgaacaccgcgatgaaacgcagcgttgcgaaagctgccgttgagttgattcagcctggtcatcgggtgatcctcgactccgggaccaccacttttgagattgctcgtctgatgcgcaagcacactgacgtaattgcgatgaccaacggtatgaacgtggctaatgcgttgctggaagcggaaggcgttgagctgctgatgaccggggggcatttgcgccgtcagtcgcaatctttttacggtgatcaggctgagcaatcgctgcaaaattaccacttcgatatgctgtttcttggtgtagatgcgatcgatctggagcgcggcgtcagcacgcataatgaagatgaagcccgtttaaaccgtcggatgtgcgaagttgcggaacggatcatcgtggtcaccgattccagtaagttcaatcgttctagtttacataagatcattgatactcaacgtatcgacatgatcattgttgatgaaggcattcctgcggatagtctggaaggactgagaaaggctggggttgaagtgattctggtcggggaatgagaaaggatgcccgctggtcaacaccaatgcgttcggcgggcattgtgaacaccatcaatggctttcttctgtctcttgggtgaggctttcccagtcggcaggaggatgtcctctttttaacattttactgaatacggtataggcatctgtttttttaccgtaggtgcgcagcgtgttttcatcgttcatccatcccagaatgatgactttctctttttcactgtaacgaaagaagagacgatagcgaccagcgccaaattttacccgtgaccagtctttatttttcccagagcctaacgacttgccatgacggaatgccggtgatgatggattgaccgtgatatgctcctcaatcactttatggaccaccgccaataactttgtggcagcttttctcnnnnnnnnnnnnnnnnnnnnnnnnnnnnnnnnnnnnnnnnnnnnnnnnnnnnnnnnnnnnnnnnnnnnnnnnnnnnnnnnnnnnnnnnnnnnnnnnnnnnnnnnnnnnnnnnnnnnnnnnnnnnnnnnnnnnnnnnnnnnnnnnnnnnnnnnnnnnnnnnnnnnnnnnnnnnnnnnnnnnnnnnnnnnnnnnnnnnnnnnnnnnnnnnnnnnnnnnnnnnnnnnnnnnnnnnnnnnnnnnnnnnnnnnnnnnnnnnnnnnnnnnnnnnnnnnnnnnnnnnnnnnnnnnnnnnnnnnnnnnnnnnnnnnnnnnnnnnnnnnnnnnnnnnnnnnnnnnnnnnnnnnnnnnnnnnnnnnnnnnnnnnnnnnnnnnnnnnnnnnnnnnnnnnnnnnnnnnnnnnnnnnnnnnnnnnnnnnnnnnnnnnnnnnnnnnnnnnnnnnnnnnnnnnnnnnnnnnnnnnnnnnnnnnnnnnnnnnnnnnnnnnnnnnnnnnnnnnnnnnnnnnnnnnnnnnnnnnnnnnnnnnnnnnnnnnnnnnnnnnnnnnnnnnnnnnnnnnnnnnnnnnnnnnnnnnnnnnnnnnnnnnnnnnnnnnnnnnnnnnnnnnnnnnnnnnnnnnnnnnnnnnnnnnnnnnnnnnnnnnnnnnnnnnnnnnnnnnnnnnnnnnnnnnnnnnnnnnnnnnnnnnnnnnnnnnnnnnnnnnnnnnnnnnnnnnnnnnnnnnnnnnnnnnnnnnnnnnnnnnnnnnnnnnnnnnnnnnnnnnnnnnnnnnnnnnnnnnnnnnnnnnnnnnnnnnnnnnnnnnnnnnnnnnnnnnnnnnnnnnnnnnnnnnnnnnnnnnnnnnnnnnnnnnnnnnnnnnnnnnnnnnnnnnnnnnnnnnnnnnnnnnnnnnnnnnnnnnnnnnnnnnnnnnnnnnnnnnnnnnnnnnnnnnnnnnnnnnnnnnnnnnnnnnnnnnnnnnnnnnnnnnnnnnnnnnnnnnnnnnnnnnnnnnnnnnnnnnnnnnnnnnnnnnnnnnnnnnnnnnnnnnnnnnnnnnnnnnnnnnnnnnnnnnnnnnnnnnnnnnnnnnnnnnnnnnnnnnnnnnnnnnnnnnnnnnnnnnnnnnnnnnnnnnnnnnnnnnnnnnnnnnnnnnnnnnnnnnnnnnnnnnnnnnnnnnnnnnnnnnnnnnnnnnnnnnnnnnnnnnnnnnnnnnnnnnnnnnnnnnnnnnnnnnnnnnnnnnnnnnnnnnnnnnnnnnnnnnnnnnnnnnnnnnnnnnnnnnnnnnnnnnnnnnnnnnnnnnnnnnnnnnnnnnnnnnnnnnnnnnnnnnnnnnnnnnnnnnnnnnnnnnnnnnnnnnnnnnnnnnnnnnnnnnnnnnnnnnnnnnnnnnnnnnnnnnnnnnnnnnnnnnnnnnnnnnnnnnnnnnnnnnnnnnnnnnnnnnnnnnnnnnnnnnnnnnnnnnnnnnnnnnnnnnnnnnnnnnnnnnnnnnnnnnnnnnnnnnnnnnnnnnnnnnnnnnnnnnnnnnnnnnnnnnnnnnnnnnnnnnnnnnnnnnnnnnnnnnnnnnnnnnnnnnnnnnnnnnnnnnnnnnnnnnnnnnnnnnnnnnnnnnnnnnnnnnnnnnnnnnnnnnnnnnnnnnnnnnnnnnnnnnnnnnnnnnnnnnnnnnnnnnnnnnnnnnnnnnnnnnnnnnnnnnnnnnnnnnnnnnnnnnnnnnnnnnnnnnnnnnnnnnnnnnnnnnnnnnnnnnnnnnnnnnnnnnnnnnnnnnnnnnnnnnnnnnnnnnnnnnnnnnnnnnnnnnnnnnnnnnnnnnnnnnnnnnnnnnnnnnnnnnnnnnnnnnnnnnnnnnnnnnnnnnnnnnnnnnnnnnnnnnnnnnnnnnnnnnnnnnnnnnnnnnnnnnnnnnnnnnnnnnnnnnnnnnnnnnnnnnnnnnnnnnnnnnnnnnnnnnnnnnnnnnnnnnnnnnnnnnnnnnnnnnnnnnnnnnnnnnnnnnnnnnnnnnnnnnnnnnnnnnnnnnnnnnnnnnnnnnnnnnnnnnnnnnnnnnnnnnnnnnnnnnnnnnnnnnnnnnnnnnnnnnnnnnnnnnnnnnnnnnnnnnnnnnnnnnnnnnnnnnnnnnnnnnnnnnnnnnnnnnnnnnnnnnnnnnnnnnnnnnnnnnnnnnnnnnnnnnnnnnnnnnnnnnnnnnnnnnnnnnnnnnnnnnnnnnnnnnnnnnnnnnnnnnnnnnnnnnnnnnnnnnnnnnnnnnnnnnnnnnnnnnnnnnnnnnnnnnnnnnnnnnnnnnnnnnnnnnnnnnnnnnnnnnnnnnnnnnnnnnnnnnnnnnnnnnnnnnnnnnnnnnnnnnnnnnnnnnnnnnnnnnnnnnnnnnnnnnnnnnnnnnnnnnnnnnnnnnnnnnnnnnnnnnnnnnnnnnnnnnnnnnnnnnnnnnnnnnnnnnnnnnnnnnnnnnnnnnnnnnnnnnnnnnnnnnnnnnnnnnnnnnnnnnnnnnnnnnnnnnnnnnnnnnnnnnnnnnnnnnnnnnnnnnnnnnnnnnnnnnnnnnnnnnnnnnnnnnnnnnnnnnnnnnnnnnnnnnnnnnnnnnnnnnnnnnnnnnnnnnnnnnnnnnnnnnnnnnnnnnnnnnnnnnnnnnnnnnnnnnnnnnnnnnnnnnnnnnnnnnnnnnnnnnnnnnnnnnnnnnnnnnnnnnnnnnnnnnnnnnnnnnnnnnnnnnnnnnnnnnnnnnnnnnnnnnnnnnnnnnnnnnnnnnnnnnnnnnnnnnnnnnnnnnnnnnnnnnnnnnnnnnnnnnnnnnnnnnnnnnnnnnnnnnnnnnnnnnnnnnnnnnnnnnnnnnnnnnnnnnnnnnnnnnnnnnnnnnnnnnnnnnnnnnnnnnnnnnnnnnnnnnnnnnnnnnnnnnnnnnnnnnnnnnnnnnnnnnnnnnnnnnnnnnnnnnnnnnnnnnnnnnnnnnnnnnnnnnnnnnnnnnnnnnnnnnnnnnnnnnnnnnnnnnnnnnnnnnnnnnnnnnnnnnnnnnnnnnnnnnnnnnnnnnnnnnnnnnnnnnnnnnnnnnnnnnnnnnnnnnnnnnnnnnnnnnnnnnnnnnnnnnnnnnnnnnnnnnnnnnnnnnnnnnnnnnnnnnnnnnnnnnnnnnnnnnnnnnnnnnnnnnnnnnnnnnnnnnnnnnnnnnnnnnnnnnnnnnnnnnnnnnnnnnnnnnnnnnnnnnnnnnnnnnnnnnnnnnnnnnnnnnnnnnnnnnnnnnnnnnnnnnnnnnnnnnnnnnnnnnnnnnnnnnnnnnnnnnnnnnnnnnnnnnnnnnnnnnnnnnnnnnnnnnnnnnnnnnnnnnnnnnnnnnnnnnnnnnnnnnnnnnnnnnnnnnnnnnnnnnnnnnnnnnnnnnnnnnnnnnnnnnnnnnnnnnnnnnnnnnnnnnnnnnnnnnnnnnnnnnnnnnnnnnnnnnnnnnnnnnnnnnnnnnnnnnnnnnnnnnnnnnnnnnnnnnnnnnnnnnnnnnnnnnnnnnnnnnnnnnnnnnnnnnnnnnnnnnnnnnnnnnnnnnnnnnnnnnnnnnnnnnnnnnnnnnnnnnnnnnnnnnnnnnnnnnnnnnnnnnnnnnnnnnnnnnnnnnnnnnnnnnnnnnnnnnnnnnnnnnnnnnnnnnnnnnnnnnnnnnnnnnnnnnnnnnnnnnnnnnnnnnnnnnnnnnnnnnnnnnnnnnnnnnnnnnnnnnnnnnnnnnnnnnnnnnnnnnnnnnnnnnnnnnnnnnnnnnnnnnnnnnnnnnnnnnnnnnnnnnnnnnnnnnnnnnnnnnnnnnnnnnnnnnnnnnnnnnnnnnnnnnnnnnnnnnnnnnnnnnnnnnnnnnnnnnnnnnnnnnnnnnnnnnnnnnnnnnnnnnnnnnnnnnnnnnnnnnnnnnnnnnnnnnnnnnnnnnnnnnnnnnnnnnnnnnnnnnnnnnnnnnnnnnnnnnnnnnnnnnnnnnnnnnnnnnnnnnnnnnnnnnnnnnnnnnnnnnnnnnnnnnnnnnnnnnnnnnnnnnnnnnnnnnnnnnnnnnnnnnnnnnnnnnnnnnnnnnnnnnnnnnnnnnnnnnnnnnnnnnnnnnnnnnnnnnnnnnnnnnnnnnnnnnnnnnnnnnnnnnnnnnnnnnnnnnnnnnnnnnnnnnnnnnnnnnnnnnnnnnnnnnnnnnnnnnnnnnnnnnnnnnnnnnnnnnnnnnnnnnnnnnnnnnnnnnnnnnnnnnnnnnnnnnnnnnnnnnnnnnnnnnnnnnnnnnnnnnnnnnnnnnnnnnnnnnnnnnnnnnnnnnnnnnnnnnnnnnnnnnnnnnnnnnnnnnnnnnnnnnnnnnnnnnnnnnnnnnnnnnnnnnnnnnnnnnnnnnnnnnnnnnnnnnnnnnnnnnnnnnnnnnnnnnnnnnnnnnnnnnnnnnnnnnnnnnnnnnnnnnnnnnnnnnnnnnnnnnnnnnnnnnnnnnnnnnnnnnnnnnnnnnnnnnnnnnnnnnnnnnnnnnnnnnnnnnnnnnnnnnnnnnnnnnnnnnnnnnnnnnnnnnnnnnnnnnnnnnnnnnnnnnnnnnnnnnnnnnnnnnnnnnnnnnnnnnnnnnnnnnnnnnnnnnnnnnnnnnnnnnnnnnnnnnnnnnnnnnnnnnnnnnnnnnnnnnnnnnnnnnnnnnnnnnnnnnnnnnnnnnnnnnnnnnnnnnnnnnnnnnnnnnnnnnnnnnnnnnnnnnnnnnnnnnnnnnnnnnnnnnnnnnnnnnnnnnnnnnnnnnnnnnnnnnnnnnnnnnnnnnnnnnnnnnnnnnnnnnnnnnnnnnnnnnnnnnnnnnnnnnnnnnnnnnnnnnnnnnnnnnnnnnnnnnnnnnnnnnnnnnnnnnnnnnnnnnnnnnnnnnnnnnnnnnnnnnnnnnnnnnnnnnnnnnnnnnnnnnnnnnnnnnnnnnnnnnnnnnnnnnnnnnnnnnnnnnnnnnnnnnnnnnnnnnnnnnnnnnnnnnnnnnnnnnnnnnnnnnnnnnnnnnnnnnnnnnnnnnnnnnnnnnnnnnnnnnnnnnnnnnnnnnnnnnnnnnnnnnnnnnnnnnnnnnnnnnnnnnnnnnnnnnnnnnnnnnnnnnnnnnnnnnnnnnnnnnnnnnnnnnnnnnnnnnnnnnnnnnnnnnnnnnnnnnnnnnnnnnnnnnnnnnnnnnnnnnnnnnnnnnnnnnnnnnnnnnnnnnnnnnnnnnnnnnnnnnnnnnnnnnnnnnnnnnnnnnnnnnnnnnnnnnnnnnnnnnnnnnnnnnnnnnnnnnnnnnnnnnnnnnnnnnnnnnnnnnnnnnnnnnnnnnnnnnnnnnnnnnnnnnnnnnnnnnnnnnnnnnnnnnnnnnnnnnnnnnnnnnnnnnnnnnnnnnnnnnnnnnnnnnnnnnnnnnnnnnnnnnnnnnnnnnnnnnnnnnnnnnnnnnnnnnnnnnnnnnnnnnnnnnnnnnnnnnnnnnnnnnnnnnnnnnnnnnnnnnnnnnnnnnnnnnnnnnnnnnnnnnnnnnnnnnnnnnnnnnnnnnnnnnnnnnnnnnnnnnnnnnnnnnnnnnnnnnnnnnnnnnnnnnnnnnnnnnnnnnnnnnnnnnnnnnnnnnnnnnnnnnnnnnnnnnnnnnnnnnnnnnnnnnnnnnnnnnnnnnnnnnnnnnnnnnnnnnnnnnnnnnnnnnnnnnnnnnnnnnnnnnnnnnnnnnnnnnnnnnnnnnnnnnnnnnnnnnnnnnnnnnnnnnnnnnnnnnnnnnnnnnnnnnnnnnnnnnnnnnnnnnnnnnnnnnnnnnnnnnnnnnnnnnnnnnnnnnnnnnnnnnnnnnnnnnnnnnnnnnnnnnnnnnnnnnnnnnnnnnnnnnnnnnnnnnnnnnnnnnnnnnnnnnnnnnnnnnnnnnnnnnnnnnnnnnnnnnnnnnnnnnnnnnnnnnnnnnnnnnnnnnnnnnnnnnnnnnnnnnnnnnnnnnnnnnnnnnnnnnnnnnnnnnnnnnnnnnnnnnnnnnnnnnnnnnnnnnnnnnnnnnnnnnnnnnnnnnnnnnnnnnnnnnnnnnnnnnnnnnnnnnnnnnnnnnnnnnnnnnnnnnnnnnnnnnnnnnnnnnnnnnnnnnnnnnnnnnnnnnnnnnnnnnnnnnnnnnnnnnnnnnnnnnnnnnnnnnnnnnnnnnnnnnnnnnnnnnnnnnnnnnnnnnnnnnnnnnnnnnnnnnnnnnnnnnnnnnnnnnnnnnnnnnnnnnnnnnnnnnnnnnnnnnnnnnnnnnnnnnnnnnnnnnnnnnnnnnnnnnnnnnnngnnnnnnnnnnnttcagggcccgcagaatgaggctgcgctctctggttgtcatttctccgggcagaaaggaaagctgctgcattgtccctgcctccattcagtcgatgatgcgcataatggcgctgcattccggatgctgcagggcgtaatcccgcagacggtaataatgaaccgtcatggcataacactccgtacggcaggcgtgatgactgtacgtcatcagacaggcggcaatgccggcggcttccgggctcatttcagcgcggttaccgttcatggcattgaacagtacccatgtttcgtcatcatcgtcatccggttcaggggccataaatgccccgccgttgttcagggtgtacagattccagataccaccgcagtagttttcgcacagacggtccatccagccgaagacacggggctccagggtcacccactgtggaatgaggccaaaatgctgcggccagaagctgatgcgctgttcatcagggactatggtggcaaccaactgaggctggtcattccctgatgcagcggttacggaaacagaagatgtggtggaattatgtgaaatggttttcatgaaatgactccttaaaggacaaataaatgcgtggttttcagggtaatggctnnnnnnnnnnnnnnnnnnnnnnnnnnnnnnnnnnnnnnnnnnnnnnnnnnnnnnnnnnnnnnnnnnnnnnnnnnnnnnnnnnnnnnnnnnnnnnnnnnnnnnnnnnnnnnnnnnnnnnnnnnnnnnnnnnnnnnnnnnnnnnnnnnnnnnnnnnnnnnnnnnnnnnnnnnnnnnnnnnnnnnnnnnnnnnnnnnnnnnnnnnnnnnnnnnnnnnnnnnnnnnnnnnnnnnnnnnnnnnnnnnnnnnnnnnnnnnnnnnnnnnnnnnnnnnnnnnnnnnnnnnnnnnnnnnnnnnnnnnnnnnnnnnnnnnnnnnnnnnnnnnnnnnnnnnnnnnnnnnnnnnnnnnnnnnnnnnnnnnnnnnnnnnnnnnnnnnnnnnnnnnnnnnnnnnnnnnnnnnnnnngnnnngnnnnnnnnnnnnnnnnnnnnnnnnnnnnnnnnnnnnnnnnnnnnnnnnnnngnnnnnnnnnnnnnnnnnnnnnnnnnnnnnnnnnnnnnnnnnnnnnnnnnnnnnnnnnnnnnnnnnnnnnnnnnnnnnnnnnnnnnnnnnnnnnnnnnnnnnnnnnnnnnnnnnnnnnnnnnnnnnnnnnnnnnnnnnnnnnnnnnnnnnnnnnnnnnnnnnnnnnnnnnnnnnnnnnnnnnnnnnnnnnnnnnnnnnnnnnnnnnnnnnnnnnnnnnnnnnnnnnnnnnnnnnnnnnnnnnnnnnnnnnnnnnnnnnnnnnnnncnnnnnnnnnnnnnnnnnnnnnnnnnnnnnnnnnnnnnnnnnnnnnnnnnnnnnnnnnnnnnnnnnnnnnnnnnnnnnnnnnnnnnnnnnnnnnnnnnnnnnnnnnnnnnnnnngnnnnnnnnnnnnnnnnnnnnnnnnnnnnnnnnnnnnnnnnnnnnnnnnnnnnnnnnnnnnnnnnnnnnnnnnnnnnnnngnnnnnnnnnnnnnnnnnnnannnnnnnnnnnnnnnnnnnnnnnnnnnnnnnnnnnnnnnnnnnnnnnnnnnnnannnnnnnnnnnnnnnnnnnnnnnnnnnnnnnnnngnnnnnnnnnnnnnnnnnnnnnnnnnnnnnnnnnnnnnnnnnnnnnnnnnnnnnnnnnnnnnnnnnnnnnnnnnnnnnnnnnnnnnnnnnnnnnnnnnnnnnnnnnngnnnnnnnnnnntgcgggaaaatcaacattattaaaatgcctgtttggtatttatcaaaaagactctggcaccattttattccagggtaaagagatcgatttccattccgccaaagnagcactggaaaatggtatttcgatggtacatcaggagttaaacctggtattacaacgttcggtgatggacaacatgtggctggggcgatatcccaccaaaggcatgtttgtcgatcaggacaaaatgtaccgcgaaaccaaagcgatttttgatgaactggatattgatatcgatccgcgtgcgcgcgtcggtacattatctgtttcgcaaatgcagatgatcgaantcgccaaagcgttttcctataacgcgaaaattgtgattatggatgaaccgacttcttcgttaaccgaaaaagaggtcaatcatctgttcactattattcgtaaattaaaagagcgcggctgcggtattgtttatatctcgcataaaatggaagaaatcttccagttatgtgatgaagttaccgtattgcgcgacggtcagtggatcgctaccgaaccgctggcaggactgacgatggacaagatcatcgccatgatggttgggcgttctcttaaccagcgtttccctgacaaagaaaacaagccgggcgnagtgattctggaagtgcgtaacctgacgtcgctgcgccagccgtcgatacgcgatgtctcgtttgatctgcataaagggnagattctcggtatagcnggtctggtgggagcgaaacgtaccgatattgttgagacgttatttggtattcgcgagaaatcggctggcaccattacgttgcacggcaaaaagatcaataaccataatgccaacgaagccataaaccacggatttgcactggtaactgaagagcgccgctcaacgggaatttatgcctatctggatntnggctttaactcgttaatttccaatatccgcaactataaaantaaagttggtttactggataactcgcggatgaaaagcgatacccagtgggtgattgattcgatgcgggtaaaaacaccggggcatcngacgcaaattggttcgctctccggtggtaatnagcaaaaagtgattattggtcgctggctgttaacgcaaccagaaatattaatgctcgatgaaccgacgcgcggtattgatgttgggnctaagtttgagatttatcagntaattgccgaactggcgaagaaaggcaaggggattattattatctcctccgaaatgccagagttgttanggataacagacngtattctggttatgagcaatggtctcgtttccggaattgtcgatacnaaaacaacaacgcaaagcgaaattctgcgtcttgcgtcttngcacctttaagattaggggcttcccatgagtgcattaaataagaaangntttcttacttacctgaangagggcggtatttacgtcgttcttttagttttgctggcgattattattttccaggacccaacattttnaantctnnnnnnnnnnnnnnnnnnnnnnnnnnnnnnnnnnnnnnnnnnnnnnnnnnnnnnnnnnnnnnnnnnnnnnnnnnnnnnnnnnnnnnnnnnnnnnnnnnnnnnnnnnnnnnnnnnnnnnnnnnnnnnnnnnnnnnnnnnnnnnnnnnnnnnnatggataacgccaacaaagtgttcccggaaatggcgacgatgccgattgcgctggttattctgattgtctgtgccattggtgcggtgatcggtttgatcaacggcttgattatcgcctatctcaacgtgacgccgttcattaccacgctcggtacgatgattatcgtctacggcattaactcgctctattacgactttgtcggggcatcgcnaatttccggttttgacagtggtttctccactttngcccaaggctttattgcgctggggagtttccgtctctcttacatcaccttctatgcgttgattgcggtggtgtttgtctgggtgttatggaacaaaacccgcttcggtaagaacatttttgccattgncggtaacccggaagcggcgnnnnnnnnnnnnnnnnnnnnnnnnnnnnnnnnnnnnnnnnnnnnnnnnnnnnnnnnnnnnnnnnnnnnnnnnnnnnnnnnnnnnnnnnnnnnnnnnnnnnnnnnnnnnnnnnnnnnnnnnnnnnnnnnnnnnnnnnnnnnnnnnnnnnnnnnnnnnnnnnnnnnnnnnnnnnnnnnnnnnnnnnnnnnnnnnnnnnnnnnnnnnnnnnnnnnnnnnnnnnnnnnnnnnnnnnnnnnnnnnnnnnnnnnnnnnnnnnnnnnnnnnnnnnnnnnnnnnnnnnnnnnnnnnnnnnnnnnnnnnnnnnnnnnnnnnnnnnnnnnnnnnnnnnnnnnnnnnnnnnnnnnnnnnnnnnnnnnnnnnnnnnnnnnnnnnnnnnnnnnnnnnnnnnnnnnnnnnnnnnnnnnnnnnnnnnnnnnnnnnnnnnnnnnnnnnnnnnnnnnnnnnnnnnnnnnnnnnnnnnnnnnnnnnnnnnnnnnnnnnnnnnnnnnnnnnnnnnnnnnnnnnnnnnnnnnnnnnnnnnnnnnnnnnnnnnnnnnnnnnnnnnnnnnnnnnnnnnnnnnnnnnnnnnnnnnnnnnnnnnnnnnnnnnnnnnnnnnnnnnnnnnnnnnnnnnnnnnnnnnnnnnnnnnnnnnnnnnnnnnnnnnnnnnnnnnnnnnnnnnnnnnnnnnnnnnnnnnnnnnnnnnnnnnnnnnnnnnnnnnnnnnnnnnnnnnnnnnattaacctgcaggatttctatcaggccgggattatttaatccttcagccccagacgtttcgccagcctatgcaggttggcgacgtcggtttccagcatccgcgcacaggcggcccagttgtgatgattttgcgccagtgcctgacgaatggtttcacgctggaacgcttctgtcgcttcacgcaggttttgcttaacaacgggcaccgccgccacttctggcggcggcaacgtcacctcaggaaaagcaaaatgttgcgcctcaagaatcacttcatcgccgctgcgggttgctctcgccagcactaccgcccgatgaatagcatgttccagttcacgaacgttccccggaaaattgtagtgttgcagtaaatttcgcgctccggcacttaataccactcgggagagccccagccgcaaacgacactgctcgcagaaataccccgccagcagaatgacatcatcgccccgctcacgcagcggcggcactgaaagtggaaacacgctcaggcggtggaacaagtcagcgcgaaatcgccctgccagtacctcttcgcgtaagtcacggttagtcgccgccagcacgcgcacatcgacccgcaaactgcggtcatcgccaacgcgttgaatatcgccatactgcaacaccctcagcagcttggcctgcaatgccaacgacaactcgccgatctcatcgagaaacagcgtgccgttatccgccatttcaaacttcccgctgcggttactgatagcaccagtaaacgcccctttcacatgcccgaacaactcactttccgccacactttccggcagtgcggcacagttgagatagaccagcggattcaccgcccgtggcgaggcttcatgaatcgctttcgccaccagctccttaccggttcccgtctcaccgctaattaaaacgttgagatcggatgccgccacaatctcaatctcttttttcaattgcgtcatgcctggcgacagaccgatcatctgcgtctgtttcaccgcttcaaacggcgcggcttcgcctggcagcatattctggctttccagttgttcaatcagtaacgcattgcttaacgctcccgccgccagcgcagcaatcaggcgtaactcttcgtcgctgaaaacatcgaactgatcgggctgcatcccgtcgagcgtcaaggcaccgatcaggttttgcccggcaaacaacggcaaaccaacgcaggcgtgaaccttcagactctcctgccctggaatcaaaccgtcataaggatcgggcaattcgctgtctgcgggaaagcgcaccacatcacccgcgcgggcaatcgcttccagccgtggatgcccttccagcgcaaagcgtctaccgagtacatccttcgccagcccgtcgatggcaagcggaataaactgccgcgagtcgtaacgtagcaacgcagacgcatcgcactccagcacctgacgcagcgtggtgatcaggcgttgaaaacgatcctgatgaccaatcccacgctgcaattcgatggcgatattcgccagcacatcaacggaaaaactcatctttgcctcactgtcaatttgactatagatattgtcatatcgaccatttgattgatagtcattttgactactcattaatgagcataattttatttatagagtaaaaacaattagataaaaaactggcacgcaatctgcaatcagcaagacatctttttagaacacgctgaataaattgaggttgctatgtctattgtggtgaaaaataacattcattgggttggtcaacgtgactgggaagtgcgtgattttcacggtacagaatataaaacgctgcgcggcagcagctacaacagctacctcatccgcgaagaaaaaaacgtgctgatcgacaccgtcgaccataaattcagccgcgaatttgtgcagaacctgcgtaatgaaatcgatctggcagatatcgattacatcgtaattaaccatgctgaagaggaccacgccggggcgctgaccgaactgatggcgcaaattcccgatacgccgatctactgtacagccaacgctatcgactcgataaatggtcatcaccatcatccggagtggaattttaatgtggtgaaaactggcgacacgctggatatcggcaacggcaaacagctcatttttgtcgaaacgccaatgctgcactggccggacagcatgatgacttacctgacaggcgacgcggtgctgttcagtaacgatgctttcggtcagcactactgcgacgagcatctgttcaacgatgaagtggatcagactgagcttttcgagcagtgccagcgttactacgccaatatcctgacgccgttcagccgcctggtaacgccgaaaattaccgagatcctgggctttaacttgccagtcgatatgatagcgacctctcacggcgtggtatggcgcgataacccgacgcaaattgtcgagctgtacctgaaatgggcggcggattatcaggaagacagaatcaccattttctacgacaccatgtcgaataacacccgcatgatggctgacgctatcgcccaagggattgcggaaaccgacccacgcgtggcggtgaaaattttcaacgtcgcccgaagcgataaaaacgaaatcctgaccaatgtcttccgctcaaaaggcgtactggtcggcacttctacgatgaataatgtgatgatgccgaaaatcgccgggctggtggaggagatgaccggattacgcttccgtaacaaacgcgccagcgctttcggctctcacggctggagcggcggtgcggtggatcgtctttccacgcgcctgcaggatgcgggtttcgaaatgtcgcttagcctgaaagccaaatggcgaccagaccaggacgctctggagttatgtcgtgaacacggtcgcgaaatcgcccgtcagtgggcgctcgcgccgctgccgcagagcacggtgaatacggtggttaaagaagaaacctctgccgccacgacggctgacctcggcccacggatgcaatgcagcgtctgccagtggatttacgatccggcaaaaggcgagccaatgcaggacgttgcgccaggaacgccgtggagtgaagtcccggataacttcctgtgcccggaatgctctctcggcaaagacgtctttgacgaacnnnnnnnnnnnnnnnnnnnnnnnnnnnnnnnnnnnnnnnnnnnnnnnnnnnnnaccggagcgctggtgtttgaaggactggcgaaagatctcgacgaggcggctgagctggcggcttccggggagatcaccttctcgccgtgccacgaacacgactgtgtgggatcgatggcgggcgtcacctcggcctcgatgtttatgcacatcgtgaaaaacaaaacctatggcaacatcgcttataccaacatgagcgagcagatggcgaagattttgcgtatgggcgctaacgaccagagcgtgatcgaccgcctcaactggatgcgcgatgtgcagggacccatgctgcgcgacgcgatgaaaattatcggcgaaatcgatctgcgcttaatgctggcgcaggcgctgcatatgggcgatgaatgccataaccgcaataacgccgggacgacgctgctgattcaggcgctgacgccggggattattcaggcaggttattccgtcgagcaacagcgcgaagtgtttgagtttgtcgccagcagcgactacttctccggcccgacgtggatggcgatgtgtaaagcggcgatggatgcggcgcacggcatcgaatacagcaccgtggtgaccactatggcgcgtaacggcgtcgagttcggcctgcgggtcagcggcctgccggggcagtggtttaccggcccggcgcagcaggtcatcggcccgatgtttgccggttataagccggaagattcggggctggatatcggcgacagcgccatcaccgaaacctacggtattggcggatttgcgatggcgaccgcgcccgcgatcgtcgcgctggtgggcggcacggtggaagaggctatcgatttctcccgtcagatgcgtgaaatcacccttggcgaaaaccccaacgtcaccattccgctgctcggttttatgggcgtgccgtcggcaatcgacatcacccgcgtgggtagcagcggcattctgccggtgatcaacaccgctattgcccataaagatgcgggcgtcggcatgattggcgcgggcattgtgcatccacccttcgcctgcttcgagaaagccattcttggctggtgcgaacgttacggcgtctgagttacatgtttatgccggatgcgacatgaatgtcttatccggcctacgaatggcgcggaaatctgtaggcctgataagcgtggcgcttcaggcattggccaccacagccggatgcggcgtgaacgccttatccggcctacgaatggcgcggaaatctgtaggcctgataagcgtggcgcttcaggcattggccaccacagccggatgcggcgtgaacgccttatccggcctacgaatggcacgggaatctgtaggcctgataagcgtagcgcatcaggcagtctggcgttggtcataaccccatcaccctctgtcgcggacataacannatgaaagaacttgtggtcgttgccattggnggcaacagcattatcaaagataacgccagccagtcgattgagcancaggcngangcggtgaangcngtggcngatacggtgctgganatgntggcntcngantacnacattgtgctgacncacggnaacgggccgcaggtngggctggatntncgncgngcgganatngcncacgagcgngaagggntgccgcttacnccgctggcnaactgngtngcngatacgcanggnggcatnggctatntgatccancaggcgctgaacaaccgnctggcgcgncncggcgagnanaangcngtcacngtggtnacncaggtngangtnganaaaaacgatccgggnttngcnnatccnancaanccnatnggngcnttctttagngnagcgcagcgnganganntncnnnnggnnaanccngnctggcgntttgttgangatncnggacgnggctancgccgngtngtngcntcnccngaaccnaaacgtattgtngaagcannngcnatnaanncgctganccancanggntttgtggtgattggngngggnggnggnggnatnccggtngtgcgtanngatcggggggattaccanagcgtggangcggtnatnganaaagatctctcnacngcgntnctggcncnnganatncncgccgacattctggtgatcaccaccggcgtcgagcaggtctgtattcattttggcaaacctaaccagcaggcgctggatacggtggatgtcgccacgatgacccgttacatgcaggagggacatttcccgccgggcagcatgttacnnannnnnnnnncttacaaaggagggagttatgccatatatacaagtagagaaagatggtcttctgtatgaggccgagtatttctatgaggatggtatggttacagtttttggaataagaggtgggcaatccagcgtagatcttaacggaatgacagagaccgctgctgcacgcactgctttacgaaatcttattagagaaaacaaagtagatcctttatctgaataaaaataggccgtcaattatgacggctatatttgatatgtattagctctaatcttatcggatagaacacaatcaggttagatctacgagttcaaccaacggattcgaaacataccatagagttactgttcagatgaggctccctaaacggttacggtcagattttgttggctatggtagattactttgaaaacggctggcactgacaagtaaaatgcaaaggggtagtcaaaccacagacaattacgtaccttagatcttattctgagatttctttgatctaaattgagtatcacaaccaaagcgaaaggagtctaaaattgtcagatctcgtaccaaaattgccagagccagtacttcctgcattacctacaactattctgcctgccatttccgaacttactgcatcattgggtatcccccgtcatgttttggcaagagacgaggaaattcagtatgcatggcgcgaccttccccgtgaactgcgtgaaattccaccagatcttcgtggtgaactggtcgccagaatgtgtgttgctgtcagcactggcctatttgatggggcaatgaactacgcatggaatgccgctatccttcagctaagaacaaaaatacggaattttggcctacccattgtcgcgcagattctgcaatcggactttgaagaaaagcatctattggagcttcaggatagccgacttcttgaacttgcactcaagctaaacctagttaacgaagatgggttcttttttcttgatcaatgtcgtgaagttcgcaataacttttcggctgcccatccgacaatgggcagcgtaaatgatcgagaatttacaacgttcttaaaccgatgcgttcgttatgctctagctgatgcatcctctccgaaaggggtagacattggggcatttatctcggcagtcaaaggtcctagatttaatgcgaatcaacatgatgtgtgggtgcaaagacttgtagatacacacgatgctcagcgtcagatgctggttggaatggtgcatggtatctattgcgatccaaatacatcagaaccgtcgcgtttgaacgcattggatataggcagctcactaaaagaaatttttactgcatctcttcgctcagatcttgtcaacaaacatagcgagtatgcagcaaaaggagacgagccacgtcatgcggcatctctccaatttttcgagaaacttggtcttttgacgctgctaaacgagtctgagcaacatgctgtcttctaccgagcaattgagcgactttggaatgtgcataacggaacaaataatttctacaacgagccaccatttgcagaacggttattagaactgtcgctacacggagcggtaccggaaactgcacaagagcaattcgttcaggtagttgtctgctgcaatattggcaatggttacggtgtttgttgggctgcagctacaagctacgaacaattaattcgtaacttttctccaagggaaattgcaacaatgattcgtttggcaagcaacaatgacaatagtcttgggcgccgtgtaaacgcattaccgtcatgccgtgcgagatttaaagctacactcgctttaattgatccagctagtatccctagtggagttaaagcggcttacgaccatttcataaagtagcaggacgcagaggcctagaacgagaagacgatttttgggcgtcatgggtaatgcgccctcactggagcattacagtcatttcagttgagagcagcctcaacgctaattttgcagcaggtgatcgaactggctgagatcctcaggggttttgagatttttagccagttcattaggcagagtttccaatatctttgactgctagattgtgttcttaaaatccccatggataacattctctcttgtcagggaaccaatataatccgcataccactgcatcatctccctacgcccatcaagatactgtgcatggttatacgtcccgcgaatcgcgttcttatcgacgtgtgcaagctgcgtttcaatccacgctgagttaaagcctttttcatgcagaatagtactcatcgtgtggcggaaaccgtgccccgtcagcctgcctttatatcccagtaattcgataacctgattaacactttccttactgataggcttgcggggatcgtttctgccgataaagaccagcggatgatgttttgatatcggttcaagctgtttaaacagcgtaataacctgttctgagagcggcacaatatggggccgtttcatcttcatcacttctgccgggatctcccatagttttgtctcaaaatctatatcctcccagcgtgcgaaacgtagttcttgcgtgcgtacaccggttaacataatgatctgagtggctgtcttcgtgatgatactgccggtataacccgccagatcgttaaggaagtgaggaagttcattggcagtaaggaaggggaaatgtacttttttcggtgtagctaacgcgctggcaagatcgggagcggggttatagtcagctctgccagtgacaattgcatagcggaacacttcaccacagcgctgacggaccttgcgcattttctccagcgctccgcgtttctccatcttgcgcagtgcttccagtagttccattggtttaatttcagcaatagggcgcttaccgatgtagggaaagatatctttttcaaaggtgtcgatgatttcatcacgatagcgtaatgaccagcgatcggctttcgactgatgccactcgcgagcaacggcctcgaaagtgtttttcaaactcatttgcagcgcgattttttcttctttttttgcctcacccggatcgccaccagccgcaagtattttcctggcttcactgcgtttctcacgagcgtcggcaagcgttacatcggggtaaacgccaatagacagcatcttttccttaccagcgaagcggtacttcatacgccagtatttggaaccattagcgttaatcagcagatacataccgccgctatcagccagcttatagggcttttcttttggcttcgcggttttcactttaacatcggttagcgccatgacatcctccggcttttgatgaatccatcctcctggggggatttctgccagtaaccaacctgatacccccaatgcaccccttatatagcaaagatgtctttaaaaccccttgttatatctcacatttttaccattatgggggtgctgatattttaagagggaaatggcacccccgaatgcacccccaaaaacaacttgatgtgggttgaagtcggttgacctcaggatataaagaaaacctgatatataagggattagaaggggttttgttgacatcgggagagttcagaagaggcattttggcggaagatcacaggagtcgaacctgcccgggaccgctggcggccccaactggatttgaagtccagccgcctcaccggagacgacgatcttccgcgcctcgattgctacatggaggcggggcgcattatagctacttccttgagtttctacatcccccagatcagttttttccgcctaatacacgcagcgtattatcacgaaagcattatagttcatataaaactcatattttacaatgatatattagcgaaattaacgctaccacgatcacataaaacaagaatcataaattaataaccagatatcggaatattcgctctcgcagggatggtttacaaaatgcgttatcggtctcagcacccctatagcatcaaggaaaagcagatgaagagtgaagtgttgtccgttaaagagaaaattggttatggcatgggagacgccgccagccacattattttcgataacgtaatgttatatatgatgttcttttataccgatatttttggcattcctgccggatttgtcggaaccatgtttttggtcgctcgtgcactggatgcgatttccgatccttgcatggggttgttggccgatcgaacgcgctctcgctggggtaaatttcggccgtgggtgctgtttggcgcactgccattcgggatcgtctgtgtactggcctatagcacgccagatctcagtatgaacggaaaaatgatttatgcagcaattacttacaccctacttaccttactttataccatcgtcaatatcccttactgcgcattgggtggtgtaatcaccaatgacccgactcagcgtatctcgctgcaatcctggcgttttgtgctggcgaccgcgggaggcatgctctctactgttctgatgatgccactggttaatttaattggtggtgataataaaccactcggtttccagggcggtatcgcggtcctttccgtggtggcatttatgatgctggcattctgtttcttcaccactaaagaacgcgttgaannnnnnnnnnnnnnnnnnnnnnnnnnnnnnnnnnnnnnnnnnnnnnnnnnnnnnnnnnnnnnnnnnnnnnnnnnnnnnnnnnnnnnnnnnnnnnnnnnnnnnnnnnnnnnnnnnnnnnnnnnnnnnnnnnnnnnnnnnnnnnnnnnnnnnnnnnnnnnnnnnnnnnnnnnnnnnnnnnnnnnnnnnnnnnnnnnnnnnnnnnnnnnnnnnnnnnnnnnnnnnnnnnnnnnnnnnnnnnnnnnnnnnnnnnnnnnnnnnnnnnnnnnnnnnnnnnnnnnnnnnnnnnnnnnnnnnnnnnnnnnnnnnnnnnnnnnnnnnnnnnnnnnnnnnnnnnnnnnnnnnnnnnnnnnnnnnnnnnnnnnnnnnnnnnnnnnnnnnnnnnnnnnnnnnnnnnnnnnnnnnnnnnnnnnnnnnnnnnnnnnnnnnnnnnnnnnnnnnnnnnnnnnnnnnnnnnnnnnnnnnnnnnnnnnnnnnnnnnnnnnnnnnnnnnnnnnnnnnnnnnnnnnnnnnnnnnnnnnnnnnnnnnnnnnnnnnnnnnnnnnnnnnnnnnnnnnnnnnnnnnnnnnnnnnnnnnnnnnnnnnnnnnnnnnnnnnnnnnnnnnnnnnnnnnnnnnnnnnnnnnnnnnnnnnnnnnnnnnnnnnnnnnnnnnnnnnnnnnnnnnnnnnnnnnnnnnnnnnnnnnnnnnnnnnnnnnnnnnnnnnnnnnnnnnnnnnnnnnnnnnnnnnnnnnnnnnnnnnnnnnnnnnnnnnnnnnnnnnnnnnnnnnnnnnnnnnnnnnnnnnnnnnnnnnnnnnnnnnnnnnnnnnnnnnnnnnnnnnnnnnnnnnnnnnnnnnnnnnnnnnnnnnnnnnnnnnnnnnnnnnnnnnnnnnnnnnnnnnnnnnnnnnnnnnnnnnnnnnnnnnnnnnnnnnnnnnnnnnnnnnnnnnnnnnnnnnnnnnnnnnnnnnnnnnnnnnnnnnnnnnnnnnnnnnnnnnnnnnnnnnnnnnnnnnnnnnnnnnnnnnnnnnnnnnnnnnnnnnnnnnnnnnnnnnnnnnnnnnnnnnnnnnnnnnnnnnnnnnnnnnnnnnnnnnnnnnnnnnnnnnnnnnnnnnnnnnnnnnnnnnnnnnnnnnnnnnnnnnnnnnnnnnnnnnnnnnnnnnnnnnnnnnnnnnnnnnnnnnnnnnnnnnnnnnnnnnnnnnnnnnnnnnnnnnnnnnnnnnnnnnnnnnnnnnnnnnnnnnnnnnnnnnnnnnnnnnnnnnnnnnnnnnnnnnnnnnnnnnnnnnnnnnnnnnnnnnnnnnnnnnnnnnnnnnnnnnnnnnnnnnnnnnnnnnnnnnnnnnnnnnnnnnnnnnnnnnnnnnnnnnnnnnnnnnnnnnnnnnnnnnnnnnnnnnnnnnnnnnnnnnnnnnnnnnnnnnnnnnnnnnnnnnnnnnnnnnnnnnnnnnnnnnnnnnnnnnnnnnnnnnnnnnnnnnnnnnnnnnnnnnnnnnnnnnnnnnnnnnnnnnnnnnnnnnnnnnnnnnnnnnnnnnnnnnnnnnnnnnnnnnnnnnnnnnnnnnnnnnnnnnnnnnnnnnnnnnnnnnnnnnnnnnnnnnnnnnnnnnnnnnnnnnnnnnnnnnnnnnnnnnnnnnnnnnnnnnnnnnnnnnnnnnnnnnnnnnnnnnnnnnnnnnnnnnnnnnnnnnnnnnnnnnnnnnnnnnnnnnnnnnnnnnnnnnnnnnnnnnnnnnnnnnnnnnnnnnnnnnnnnnnnnnnnnnnnnnnnnnnnnnnnnnnnnnnnnnnnnnnnnnnnnnnnnnnnnnnnnnnnnnnnnnnnnnnnnnnnnnnnnnnnnnnnnnnnnnnnnnnnnnnnnnnnnnnnnnnnnnnnnnnnnnnnnnnnnnnnnnnnnnnnnnnnnnnnnnnnnnnnnnnnnnnnnnnnnnnnnnnnnnnnnnnnnnnnnnnnnnnnnnnnnnnnnnnnnnnnnnnnnnnnnnnnnnnnnnnnnnnnnnnnnnnnnnnnnnnnnnnnnnnnnnnnnnnnnnnnnnnnnnnnnnnnnnnnnnnnnnnnnnnnnnnnnnnnnnnnnnnnnnnnnnnnnnnnnnnnnnnnnnnnnnnnnnnnnnnnnnnnnnnnnnnnnnnnnnnnnnnnnnnnnnnnnnnnnnnnnnnnnnnnnnnnnnnnnnnnnnnnnnnnnnnnnnnnnnnnnnnnnnnnnnnnnnnnnnnnnnnnnnnnnnnnnnnnnnnnnnnnnnnnnnnnnnnnnnnnnnnnnnnnnnnnnnnnnnnnnnnnnnnnnnnnnnnnnnnnnnnnnnnnnnnnnnnnnnnnnnnnnnnnnnnnnnnnnnnnnnnnnnnnnnnnnnnnnnnnnnnnnnnnnnnnnnnnnnnnnnnnnnnnnnnnnnnnnnnnnnnnnnnnnnnnnnnnnnnnnnnnnnnnnnnnnnnnnnnnnnnnnnnnnnnnnnnnnnnnnnnnnnnnnnnnnnnnnnnnnnnnnnnnnnnnnnnnnnnnnnnnnnnnnnnnnnnnnnnnnnnnnnnnnnnnnnnnnnnnnnnnnnnnnnnnnnnnnnnnnnnnnnnnnnnnnnnnnnnnnnnnnnnnnnnnnnnnnnnnnnnnnnnnnnnnnnnnnnnnnnnnnnnnnnnnnnnnnnnnnnnnnnnnnnnnnnnnnnnnnnnnnnnnnnnnnnnnnnnnnnnnnnnnnnnnnnnnnnnnnnnnnnnnnnnnnnnnnnnnnnnnnnnnnnnnnnnnnnnnnnnnnnnnnnnnnnnnnnnnnnnnnnnnnnnnnnnnnnnnnnnnnnnnnnnnnnnnnnnnnnnnnnnnnnnnnnnnnnnnnnnnnnnnnnnnnnnnnnnnnnnnnnnnnnnnnnnnnnnnnnnnnnnnnnnnnnnnnnnnnnnnnnnnnnnnnnnnnnnnnnnnnnnnnnnnnnnnnnnnnnnnnnnnnnnnnnnnnnnnnnnnnnnnnnnnnnnnnnnnnnnnnnnnnnnnnnnnnnnnnnnnnnnnnnnnnnnnnnnnnnnnnnnnnnnnnnnnnnnnnnnnnnnnnnnnnnnnnnnnnnnnnnnnnnnnnnnnnnnnnnnnnnnnnnnnnnnnnnnnnnnnnnnnnnnnnnnnnnnnnnnnnnnnnnnnnnnnnnnnnnnnnnnnnnnnnnnnnnnnnnnnnnnnnnnnnnnnnnnnnnnnnnnnnnnnnnnnnnnnnnnnnnnnnnnnnnnnnnnnnnnnnnnnnnnnnnnnnnnnnnnnnnnnnnnnnnnnnnnnnnnnnnnnnnnnnnnnnnnnnnnnnnnnnnnnnnnnnnnnnnnnnnnnnnnnnnnnnnnnnnnnnnnnnnnnnnnnnnnnnnnnnnnnnnnnnnnnnnnnnnnnnnnnnnnnnnnnnnnnnnnnnnnnnnnnnnnnnnnnnnnnnnnnnnnnnnnnnnnnnnnnnnnnnnnnnnnnnnnnnnnnnnnnnnnnnnnnnnnnnnnnnnnnnnnnnnnnnnnnnnnnnnnnnnnnnnnnnnnnnnnnnnnnnnnnnnnnnnnnnnnnnnnnnnnnnnnnnnnnnnnnnnnnnnnnnnnnnnnnnnnnnnnnnnnnnnnnnnnnnnnnnnnnnnnnnnnnnnnnnnnnnnnnnnnnnnnnnnnnnnnnnnnnnnnnnnnnnnnnnnnnnnnnnnnnnnnnnnnnnnnnnnnnnnnnnnnnnnnnnnnnnnnnnnnnnnnnnnnnnnnnnnnnnnnnnnnnnnnnnnnnnnnnnnnnnnnnnnnnnnnnnnnnnnnnnnnnnnnnnnnnnnnnnnnnnnnnnnnnnnnnnnnnnnnnnnnnnnnnnnnnnnnnnnnnnnnnnnnnnnnnnnnnnnnnnnnnnnnnnnnnnnnnnnnnnnnnnnnnnnnnnnnnnnnnnnnnnnnnnnnnnnnnnnnnnnnnnnnnnnnnnnnnnnnnnnnnnnnnnnnnnnnnnnnnnnnnnnnnnnnnnnnnnnnnnnnnnnnnnnnnnnnnnnnnnnnnnnnnnnnnnnnnnnnnnnnnnnnnnnnnnnnnnnnnnnnnnnnnnnnnnnnnnnnnnnnnnnnnnnnnnnnnnnnnnnnnnnnnnnnnnnnnnnnnnnnnnnnnnnnnnnnnnnnnnnnnnnnnnnnnnnnnnnnnnnnnnnnnnnnnnnnnnnnnnnnnnnnnnnnnnnnnnnnnnnnnnnnnnnnnnnnnnnnnnnnnnnnnnnnnnnnnnnnnnnnnnnnnnnnnnnnnnnnnnnnnnnnnnnnnnnnnnnnnnnnnnnnnnnnnnnnnnnnnnnnnnnnnnnnnnnnnnnnnnnnnnnnnnnnnnnnnnnnnnnnnnnnnnnnnnnnnnnnnnnnnnnnnnnnnnnnnnnnnnnnnnnnnnnnnnnnnnnnnnnnnnnnnnnnnnnnnnnnnnnnnnnnnnnnnnnnnnnnnnnnnnnnnnnnnnnnnnnnnnnnnnnnnnnnnnnnnnnnnnnnnnnnnnnnnnnnnnnnnnnnnnnnnnnnnnnnnnnnnnnnnnnnnnnnnnnnnnnnnnnnnnnnnnnnnnnnnnnnnnnnnnnnnnnnnnnnnnnnnnnnnnnnnnnnnnnnnnnnnnnnnnnnnnnnnnnnnnnnnnnnnnnnnnnnnnnnnnnnnnnnnnnnnnnnnnnnnnnnnnnnnnnnnnnnnnnnnnnnnnnnnnnnnnnnnnnnnnnnnnnnnnnnnnnnnnnnnnnnnnnnnnnnnnnnnnnnnnnnnnnnnnnnnnnnnnnnnnnnnnnnnnnnnnnnnnnnnnnnnnnnnnnnnnnnnnnnnnnnnnnnnnnnnnnnnnnnnnnnnnnnnnnnnnnnnnnnnnnnnnnnnnnnnnnnnnnnnnnnnnnnnnnnnnnnnnnnnnnnnnnnnnnnnnnnnnnnnnnnnnnnnnnnnnnnnnnnnnnnnnnnnnnnnnnnnnnnnnnnnnnnnnnnnnnnnnnnnnnnnnnnnnnnnnnnnnnnnnnnnnnnnnnnnnnnnnnnnnnnnnnnnnnnnnnnnnnnnnnnnnnnnnnnnnnnnnnnnnnnnnnnnnnnnnnnnnnnnnnnnnnnnnnnnnnnnnnnnnnnnnnnnnnnnnnnnnnnnnnnnnnnnnnnnnnnnnnnnnnnnnnnnnnnnnnnnnnnnnnnnnnnnnnnnnnnnnnnnnnnnnnnnnnnnnnnnnnnnnnnnnnnnnnnnnnnnnnnnnnnnnnnnnnnnnnnnnnnnnnnnnnnnnnnnnnnnnnnnnnnnnnnnnnnnnnnnnnnnnnnnnnnnnnnnnnnnnnnnnnnnnnnnnnnnnnnnnnnnnnnnnnnnnnnnnnnnnnnnnnnnnnnnnnnnnnnnnnnnnnnnnnnnnnnnnnnnnnnnnnnnnnnnnnnnnnnnnnnnnnnnnnnnnnnnnnnnnnnnnnnnnnnnnnnnnnnnnnnnnnnnnnnnnnnnnnnnnnnnnnnnnnnnnnnnnnnnnnnnnnnnnnnnnnnnnnnnnnnnnnnnnnnnnnnnnnnnnnnnnnnnnnnnnnnnnnnnnnnnnnnnnnnnnnnnnnnnnnnnnnnnnnnnnnnnnnnnnnnnnnnnnnnnnnnnnnnnnnnnnnnnnnnnnnnnnnnnnnnnnnnnnnnnnnnnnnnnnnnnnnnnnnnnnnnnnnnnnnnnnnnnnnnnnnnnnnnnnnnnnnnnnnnnnnnnnnnnnnnnnnnnnnnnnnnnnnnnnnnnnnnnnnnnnnnnnnnnnnnnnnnnnnnnnnnnnnnnnnnnnnnnnnnnnnnnnnnnnnnnnnnnnnnnnnnnnnnnnnnnnnnnacgaacctttgctggaaaaattacgcgccaaaggcgtggagatggcgtttgtgacgttgcacgttggtgcgggcaccttccagccggtgcgcgtcgacaccattgaagatcacatcatgcactcggaatacgctgaagtgccgcaggatgtggtagacgcggtattggcggcgaaagcgcgcggtaaccgggtgattgcggttggtaccacctcagtacgttcgctggaaagtgcggctcaggcagcgaaaaacgatctcattgaaccgttatttgacgatacccaaatctttatctatccgggcttccagtacaaagtggtcgatgcgctggtgacgaacttccaccttccggaatcgacgctgattatgctggtttcggcatttgctggttatcaacacaccatgaatgcctataaagcggcggtagaagagaaatatcgcttttttagttacggtgatgcgatgtttatcacgtacaatccgcaggcaattaatgagcgcgttggggagtaattccgcggcgctggtttaaacgttggactgtttttctgacgtagtggagaaaaaatgaaatttgaactggacaccaccgacggtcgcgcacgccgtggccgcctggtctttgatcgtggcgtagtggaaacgccttgttttatgcctgttggcacttacggcaccgtaaaagggatgacgccggaagaagttgaagccactggcgcgcaaattatcctcggcaacaccttccacctgtggctgcgcccgggccaggaaatcatgaaactgcacggcgatctgcacgattttatgcagtggaaaggaccaatccttaccgactccggcggcttccaggtcttcagccttggtgatattcgtaaaatcaccgaacagggcgttcacttccgcaacccgatcaacggcgacccgattttcctcgacccggaaaagtcgatggagattcagtacgatcttggttcggatatcgtcatgatctttgatgagtgtacgccgtatcctgctgactgggattacgcaaaacgctccatggagatgtctctgcgttgggcgaagcgtagccgtgagcgttttgacagtctcggaaacaaaaatgcgctgtttggtatcattcagggcagtgtttacgaagatttacgtgatatttctgttaaaggtctggtagatatcggttttgatggctacgctgtcggcggtctggctgtgggtgagccgaaagcagatatgcaccgtattctggagcatgtatgcccgcaaattccggcagacaaaccgcgttacctgatgggcgttggtaaaccagaagacctggttgagggcgtacgtcgcggtatcgatatgtttgactgcgtaatgccaacccgcaacgcccgaaatggtcatttgttcgtgaccgatggcgtggtgaaaatccgcaatgcgaagtataagagcgatactggcccactcgatcctgagtgtgattgctacacctgtcgcaattattcacgcgcttacttgcatnnnnnnnnnnnnnnnnnnnnnnnnnnnnnnnnnnnnnnnnnnnnnnnnnnnnnnnnnnnnnnnnnnnnnnnnnnnnnnnnnnnnnnnnnnnnnnnnnnnnnnnnnnnnnnnnnnnnnnnnnnnnnnnnnnnnnnnnnnnnnnnnnnnnnnnnnnnnnnnnnnnnnnnnnnnnnnnnnnnnnnnnnnnnnnnnnnnnnnnnnnnnnnnnnnnnnnnnnnnnnnnnnnnnnnnnnnnnnnnnnnnnnnnnnnnnnnnnnnnnnnnnnnnnnnnnnnnnnnnnnnnnnnnnnnnnnnnnnnnnnnnnnnnnnnnnnnnnnnnnnnnnnnnnnnnnnnnnnnnnnnnnnnnnnnnnnnnnnnnnnnnnnnnnnnnnnnnnnnnnnnnnnnnnnnnnnnnnnnnnnnnnnnnnnnnnnnnnnnnnnnnnnnnnnnnnnnnnnnnnnnnnnnnnnnnnnnnnnnnnnnnnnnnnnnnnnnnnnnnnnnnnnnnnnnnnnnnnnnnnnnnnnnnnnnnnnnnnnnnnnnnnnnnnnnnnnnnnnnnnnnnnnnnnnnnnnnnnnnnnnnnnnnnnnnnnnnnnnnnnnnnnnnnnnnnnnnnnnnnnnnnnnnnnnnnnnnnnnnnnnnnnnnnnnnnnnnnnnnnnnnnnnnnnnnnnnnnnnnnnnnnnnnnnnnnnnnnnnnnnnnnnnnnnnnnnnnnnnnnnnnnnnnnnnnnnnnnnnnnnnnnnnnnnnnnnnnnnnnnnnnnnnnnnnnnnnnnnnnnnnnnnnnnnnnnnnnnnnnnnnnnnnnnnnnnnnnnnnnnnnnnnnnnnnnnnnnnnnnnnnnnnnnnnnnnnnnnnnnnnnnnnnnnnnnnnnnnnnnnnnnnnnnnnnnnnnnnnnnnnnnnnnnnnnnnnnnnnnnnnnnnnnnnnnnnnnnnnnnnnnnnnnnnnnnnnnnnnnnnnnnnnnnnnnnnnnnnnnnnnnnnnnnnnnnnnnnnnnnnnnnnnnnnnnnnnnnnnnnnnnnnnnnnnnnnnnnnnnnnnnnnnnnnnnnnnnnnnnnnnnnnnnnnnnnnnnnnnnnnnnnnnnnnnnnnnnnnnnnnnnnnnnnnnnnnnnnnnnnnnnnnnnnnnnnnnnnnnnnnnnnnnnnnnnnnnnnnnnnnnnnnnnnnnnnnnnnnnnnnnnnnnnnnnnnnnnnnnnnnnnnnnnnnnnnnnnnnnnnnnnnnnnnnnnnnnnnnnnnnnnnnnnnnnnnnnnnnnnnnnnnnnnnnnnnnnnnnnnnnnnnnnnnnnnnnnnnnnnnnnnnnnnnnnnnnnnnnnnnnnnnnnnnnnnnnnnnnnnnnnnnnnnnnnnnnnnnnnnnnnnnnnnnnnnnnnnnnnnnnnnnnnnnnnnnnnnnnnnnnnnnnnnnnnnnnnnnnnnnnnnnnnnnnnnnnnnnnnnnnnnnnnnnnnnnnnnnnnnnnnnnnnnnnnnnnnnnnnnnnnnnnnnnnnnnnnnnnnnnnnnnnnnnnnnnnnnnnnnnnnnnnnnnnnnnnnnnnnnnnnnnnnnnnnnnnnnnnnnnnnnnnnnnnnnnnnnnnnnnnnnnnnnnnnnnnnnnnnnnnnnnnnnnnnnnnnnnnnnnnnnnnnnnnnnnnnnnnnnnnnnnnnnnnnnnnnnnnnnnnnnnnnnnnnnnnnnnnnnnnnnnnnnnnnnnnnnnnnnnnnnnnnnnnnnnnnnnnnnnnnnnnnnnnnnnnnnnnnnnnnnnnnnnnnnnnnnnnnnnnnnnnnnnnnnnnnnnnnnnnnnnnnnnnnnnnnnnnnnnnnnnnnnnnnnnnnnnnnnnnnnnnnnnnnnnnnnnnnnnnnnnnnnnnnnnnnnnnnnnnnnnnnnnnnnnnnnnnnnnnnnnnnnnnnnnnnnnnnnnnnnnnnnnnnnnnnnnnnnnnnnnnnnnnnnnnnnnnnnnnnnnnnnnnnnnnnnnnnnnnnnnnnnnnnnnnnnnnnnnnnnnnnnnnnnnnnnnnnnnnnnnnnnnnnnnnnnnnnnnnnnnnnnnnnnnnnnnnnnnnnnnnnnnnnnnnnnnnnnnnnnnnnnnnnnnnnnnnnnnnnnnnnnnnnnnnnnnnnnnnnnnnnnnnnnnnnnnnnnnnnnnnnnnnnnnnnnnnnnnnnnnnnnnnnnnnnnnnnnnnnnnnnnnnnnnnnnnnnnnnnnnnnnnnnnnnnnnnnnnnnnnnnnnnnnnnnnnnnnnnnnnnnnnnnnnnnnnnnnnnnnnnnnnnnnnnnnnnnnnnnnnnnnnnnnnnnnnnnnnnnnnnnnnnnnnnnnnnnnnnnnnnnnnnnnnnnnnnnnnnnnnnnnnnnnnnnnnnnnnnnnnnnnnnnnnnnnnnnnnnnnnnnnnnnnnnnnnnnnnnnnnnnnnnnnnnnnnnnnnnnnnnnnnnnnnnnnnnnnnnnnnnnnnnnnnnnnnnnnnnnnnnnnnnnnnnnnnnnnnnnnnnnnnnnnnnnnnnnnnnnnnnnnnnnnnnnnnnnnnnnnnnnnnnnnnnnnnnnnnnnnnnnnnnnnnnnnnnnnnnnnnnnnnnnnnnnnnnnnnnnnnnnnnnnnnnnnnnnnnnnnnnnnnnnnnnnnnnnnnnnnnnnnnnnnnnnnnnnnnnnnnnnnnnnnnnnnnnnnnnnnnnnnnnnnnnnnnnnnnnnnnnnnnnnnnnnnnnnnnnnnnnnnnnnnnnnnnnnnnnnnnnnnnnnnnnnnnnnnnnnnnnnnnnnnnnnnnnnnnnnnnnnnnnnnnnnnnnnnnnnnnnnnnnnnnnnnnnnnnnnnnnnnnnnnnnnnnnnnnnnnnnnnnnnnnnnnnnnnnnnnnnnnnnnnnnnnnnnnnnnnnnnnnnnnnnnnnnnnnnnnnnnnnnnnnnnnnnnnnnnnnnnnnnnnnnnnnnnnnnnnnnnnnnnnnnnnnnnnnnnnnnnnnnnnnnnnnnnnnnnnnnnnnnnnnnnnnnnnnnnnnnnnnnnnnnnnnnnnnnnnnnnnnnnnnnnnnnnnnnnnnnnnnnnnnnnnnnnnnnnnnnnnnnnnnnnnnnnnnnnnnnnnnnnnnnnnnnnnnnnnnnnnnnnnnnnnnnnnnnnnnnnnnnnnnnnnnnnnnnnnnnnnnnnnnnnnnnnnnnnnnnnnnnnnnnnnnnnnnnnnnnnnnnnnnnnnnnnnnnnnnnnnnnnnnnnnnnnnnnnnnnnnnnnnnnnnnnnnnnnnnnnnnnnnnnnnnnnnnnnnnnnnnnnnnnnnnnnnnnnnnnnnnnnnnnnnnnnnnnnnnnnnnnnnnnnnnnnnnnnnnnnnnnnnnnnnnnnnnnnnnnnnnnnnnnnnnnnnnnnnnnnnnnnnnnnnnnnnnnnnnnnnnnnnnnnnnnnnnnnnnnnnnnnnnnnnnnnnnnnnnnnnnnnnnnnnnnnnnnnnnnnnnnnnnnnnnnnnnnnnnnnnnnnnnnnnnnnnnnnnnnnnnnnnnnnnnnnnnnnnnnnnnnnnnnnnnnnnnnnnnnnnnnnnnnnnnnnnnnnnnnnnnnnnnnnnnnnnnnnnnnnnnnnnnnnnnnnnnnnnnnnnnnnnnnnnnnnnnnnnnnnnnnnnnnnnnnnnnnnnnnnnnnnnnnnnnnnnnnnnnnnnnnnnnnnnnnnnnnnnnnnnnnnnnnnnnnnnnnnnnnnnnnnnnnnnnnnnnnnnnnnnnnnnnnnnnnnnnnnnnnnnnnnnnnnnnnnnnnnnnnnnnnnnnnnnnnnnnnnnnnnnnnnnnnnnnnnnnnnnnnnnnnnnnnnnnnnnnnnnnnnnnnnnnnnnnnnnnnnnnnnnnnnnnnnnnnnnnnnnnnnnnnnnnnnnnnnnnnnnnnnnnnnnnnnnnnnnnnnnnnnnnnnnnnnnnnnnnnnnnnnnnnnnnnnnnnnnnnnnnnnnnnnnnnnnnnnnnnnnnnnnnnnnnnnnnnnnnnnnnnnnnnnnnnnnnnnnnnnnnnnnnnnnnnnnnnnnnnnnnnnnnnnnnnnnnnnnnnnnnnnnnnnnnnnnnnnnnnnnnnnnnnnnnnnnnnnnnnnnnnnnnnnnnnnnnnnnnnnnnnnnnnnnnnnnnnnnnnnnnnnnnnnnnnnnnnnnnnnnnnnnnnnnnnnnnnnnnnnnnnnnnnnnnnnnnnnnnnnnnnnnnnnnnnnnnnnnnnnnnnnnnnnnnnnnnnnnnnnnnnnnnnnnnnnnnnnnnnnnnnnnnnnnnnnnnnnnnnnnnnnnnnnnnnnnnnnnnnnnnnnnnnnnnnnnnnnnnnnnnnnnnnnnnnnnnnnnnnnnnnnnnnnnnnnnnnnnnnnnnnnnnnnnnnnnnnnnnnnnnnnnnnnnnnnnnnnnnnnnnnnnnnnnnnnnnnnnnnnnnnnnnnnnnnnnnnnnnnnnnnnnnnnnnnnnnnnnnnnnnnnnnnnnnnnnnnnnnnnnnnnnnnnnnnnnnnnnnnnnnnnnnnnnnnnnnnnnnnnnnnnnnnnnnnnnnnnnnnnnnnnnnnnnnnnnnnnnnnnnnnnnnnnnnnnnnnnnnnnnnnnnnnnnnnnnnnnnnnnnnnnnnnnnnnnnnnnnnnnnnnnnnnnnnnnnnnnnnnnnnnnnnnnnnnnnnnnnnnnnnnnnnnnnnnnnnnnnnnnnnnnnnnnnnnnnnnnnnnnnnnnnnnnnnnnnnnnnnnnnnnnnnnnnnnnnnnnnnnnnnnnnnnnnnnnnnnnnnnnnnnnnnnnnnnnnnnnnnnnnnnnnnnnnnnnnnnnnnnnnnnnnnnnnnnnnnnnnnnnnnnnnnnnnnnnnnnnnnnnnnnnnnnnnnnnnnnnnnnnnnnnnnnnnnnnnnnnnnnnnnnnnnnnnnnnnnnnnnnnnnnnnnnnnnnnnnnnnnnnnnnnnnnnnnnnnnnnnnnnnnnnnnnnnnnnnnnnnnnnnnnnnnnnnnnnnnnnnnnnnnnnnnnnnnnnnnnnnnnnnnnnnnnnnnnnnnnnnnnnnnnnnnnnnnnnnnnnnnnnnnnnnnnnnnnnnnnnnnnnnnnnnnnnnnnnnnnnnnnnnnnnnnnnnnnnnnnnnnnnnnnnnnnnnnnnnnnnnnnnnnnnnnnnnnnnnnnnnnnnnnnnnnnnnnnnnnnnnnnnnnnnnnnnnnnnnnnnnnnnnnnnnnnnnnnnnnnnnnnnnnnnnnnnnnnnnnnnnnnnnnnnnnnnnnnnnnnnnnnnnnnnnnnnnnnnnnnnnnnnnnnnnnnnnnnnnnnnnnnnnnnnnnnnnnnnnnnnnnnnnnnnnnnnnnnnnnnnnnnnnnnnnnnnnnnnnnnnnnnnnnnnnnnnnnnnnnnnnnnnnnnnnnnnnnnnnnnnnnnnnnnnnnnnnnnnnnnnnnnnnnnnnnnnnnnnnnnnnnnnnnnnnnnnnnnnnnnnnnnnnnnnnnnnnnnnnnnnnnnnnnnnnnnnnnnnnnnnnnnnnnnnnnnnnnnnnnnnnnnnnnnnnnnnnnnnnnnnnnnnnnnnnnnnnnnnnnnnnnnnnnnnnnnnnnnnnnnnnnnnnnnnnnnnnnnnnnnnnnnnnnnnnnnnnnnnnnnnnnnnnnnnnnnnnnnnnnnnnnnnnnnnnnnnnnnnnnnnnnnnnnnnnnnnnnnnnnnnnnnnnnnnnnnnnnnnnnnnnnnnnnnnnnnnnnnnnnnnnnnnnnnnnnnnnnnnnnnnnnnnnnnnnnnnnnnnnnnnnnnnnnnnnnnnnnnnnnnnnnnnnnnnnnnnnnnnnnnnnnnnnnnnnnnnnnnnnnnnnnnnnnnnnnnnnnnnnnnnnnnnnnnnnnnnnnnnnnnnnnnnnnnnnnnnnnnnnnnnnnnnnnnnnnnnnnnnnnnnnnnnnnnnnnnnnnnnnnnnnnnnnnnnnnnnnnnnnnnnnnnnnnnnnnnnnnnnnnnnnnnnnnnnnnnnnnnnnnnnnnnnnnnnnnnnnnnnnnnnnnnnnnnnnnnnnnnnnnnnnnnnnnnnnnnnnnnnnnnnnnnnnnnnnnnnnnnnnnnnnnnnnnnnnnnnnnnnnnnnnnnnnnnnnnnnnnnnnnnnnnnnnnnnnnnnnnnnnnnnnnnggccaaactgcgggcacgcggcgtagcacagaccacagttgatgcaaccggagaactggtgatacttcgccatctgcgccggggtctggatgttagtaccctgatccgcggtgcgggagttgccgatgatgtacggtttgatcgcttccagactttcgatgaagtgagtcatatcgaccaccagatcgcgttcaatcgggaagttagctaacgcttcaaccttcataccgtcggtgtaatcacgcaggaaggttttacatgccagttttggcacgttgttaaccatcatgccgcaggagccacaaatcgccatacgnnnnnnnnnnnnnnnnnnnnnnnnnnnnnnnnnnnnnnnnnnnnnnnnnnnnnnnnnnnnnnnnnnnnnnnnnnnnnnnnnnnnnnnnnnnnnnnnnnnnnnnnnnnnnnnnnnnnnnnnnnnnnnnnnnnnnnnnnnnnnnnnnnnnnnnnnnnnnnnnnnnnnnnnnnnnnnnnnnnnnnnnnnnnnnnnnnnnnnnnnnnnnnnnnnnnnnnnnnnnnnnnnnnnnnnnnnnnnnnnnnnnnnnnnnnnnnnnnnnnnnnnnnnnnnnnnnnnnnnnnnnnnnnnnnnnnnnnnnnnnnnnnnnnnnnnnnnnnnnnnnnnnnnnnnnnnnnnnnnnnnnnnnnnnnnnnnnnnnnnnnnnnnnnnnnnnnnnnnnnnnnnnnnnnnnnnnnnnnnnnnnnnnnnnnnnnnnnnnnnnnnnnnnnnnnnnnnnnnnnnnnnnnnnnnnnnnnnnnnnnnnnnnnnnnnnnnnnnnnnnnnnnnnnnnnnnnnnnnnnnnnnnnnnnnnnnnnnnnnnnnnnnnnnnnnnnnnnnnnnnnnnnnnnnnnnnnnnnnnnnnnnnnnnnnnnnnnnnnnnnnnnnnnnnnnnnnnnnnnnnnnnnnnnnnnnnnnnnnnnnnnnnnnnnnnnnnnnnnnnnnnnnnnnnnnnnnnnnnnnnnnnnnnnnnnnnnnnnnnnnnnnnnnnnnnnnnnnnnnnnnnnnnnnnnnnnnnnnnnnnnnnnnnnnnnnnnnnnnnnnnnnnnnnnnnnnnnnnnnnnnnnnnnnnnnnnnnnnnnnnnnnnnnnnnnnnnnnnnnnnnnnnnnnnnnnnnnnnnnnnnnnnnnnnnnnnnnnnnnnnnnnnnnnnnnnnnnnnnnnnnnnnnnnnnnnnnnnnnnnnnnnnnnnnnnnnnnnnnnnnnnnnnnnnnnnnnnnnnnnnnnnnnnnnnnnnnnnnnnnnnnnnnnnnnnnnnnnnnnnnnnnnnnnnnnnnnnnnnnnnnnnnnnnnnnnnnnnnnnnnnnnnnnnnnnnnnnnnnnnnnnnnnnnnnnnnnnnnnnnnnnnnnnnnnnnnnnnnnnnnnnnnnnnnnnnnnnnnnnnnnnnnnnnnnnnnnnnnnnnnnnnnnnnnnnnnnnnnnnnnnnnnnnnnnnnnnnnnnnnnnnnnnnnnnnnnnnnnnnnnnnnnnnnnnnnnnnnnnnnnnnnnnnnnnnnnnnnnnnnnnnnnnnnnnnnnnnnnnnnnnnnnnnnnnnnnnnnnnnnnnnnnnnnnnnnnnnnnnnnnnnnnnnnnnnnnnnnnnnnnnnnnnnnnnnnnnnnnnnnnnnnnnnnnnnnnnnnnnnnnnnnnnnnnnnnnnnnnnnnnnnnnnnnnnnnnnnnnnnnnnnnnnnnnnnnnnnnnnnnnnnnnnnnnnnnnnnnnnnnnnnnnnnnnnnnnnnnnnnnnnnnnnnnnnnnnnnnnnnnnnnnnnnnnnnnnnnnnnnnnnnnnnnnnnnnnnnnnnnnnnnnnnnnnnnnnnnnnnnnnnnnnnnnnnnnnnnnnnnnnnnnnnnnnnnnnnnnnnnnnnnnnnnnnnnnnnnnnnnnnnnnnnnnnnnnnnnnnnnnnnnnnnnnnnnnnnnnnnnnnnnnnnnnnnnnnnnnnnnnnnnnnnnnnnnnnnnnnnnnnnnnnnnnnnnnnnnnnnnnnnnnnnnnnnnnnnnnnnnnnnnnnnnnnnnnnnnnnnnnnnnnnnnnnnnnnnnnnnnnnnnnnnnnnnnnnnnnnnnnnnnnnnnnnnnnnnnnnnnnnnnnnnnnnnnnnnnnnnnnnnnnnnnnnnnnnnnnnnnnnnnnnnnnnnnnnnnnnnnnnnnnnnnnnnnnnnnnnnnnnnnnnnnnnnnnnnnnnnnnnnnnnnnnnnnnnnnnnnnnnnnnnnnnnnnnnnnnnnnnnnnnnnnnnnnnnnnnnnnnnnnnnnnnnnnnnnnnnnnnnnnnnnnnnnnnnnnnnnnnnnnnnnnnnnnnnnnnnnnnnnnnnnnnnnnnnnnnnnnnnnnnnnnnnnnnnnnnnnnnnnnnnnnnnnnnnnnnnnnnnnnnnnnnnnnnnnnnnnnnnnnnnnnnnnnnnnnnnnnnnnnnnnnnnnnnnnnnnnnnnnnnnnnnnnnnnnnnnnnnnnnnnnnnnnnnnnnnnnnnnnnnnnnnnnnnnnnnnnnnnnnnnnnnnnnnnnnnnnnnnnnnnnnnnnnnnnnnnnnnnnnnnnnnnnnnnnnnnnnnnnnnnnnnnnnnnnnnnnnnnnnnnnnnnnnnnnnnnnnnnnnnnnnnnnnnnnnnnnnnnnnnnnnnnnnnnnnnnnnnnnnnnnnnnnnnnnnnnnnnnnnnnnnnnnnnnnnnnnnnnnnnnnnnnnnnnnnnnnnnnnnnnnnnnnnnnnnnnnnnnnnnnnnnnnnnnnnnnnnnnnnnnnnnnnnnnnnnnnnnnnnnnnnnnnnnnnnnnnnnnnnnnnnnnnnnnnnnnnnnnnnnnnnnnnnnnnnnnnnnnnnnnnnnnnnnnnnnnnnnnnnnnnnnnnnnnnnnnnnnnnnnnnnnnnnnnnnnnnnnnnnnnnnnnnnnnnnnnnnnnnnnnnnnnnnnnnnnnnnnnnnnnnnnnnnnnnnnnnnnnnnnnnnnnnnnnnnnnnnnnnnnnnnnnnnnnnnnnnnnnnnnnnnnnnnnnnnnnnnnnnnnnnnnnnnnnnnnnnnnnnnnnnnnnnnnnnnnnnnnnnnnnnnnnnnnnnnnnnnnnnnnnnnnnnnnnnnnnnnnnnnnnnnnnnnnnnnnnnnnnnnnnnnnnnnnnnnnnnnnnnnnnnnnnnnnnnnnnnnnnnnnnnnnnnnnnnnnnnnnnnnnnnnnnnnnnnnnnnnnnnnnnnnnnnnnnnnnnnnnnnnnnnnnnnnnnnnnnnnnnnnnnnnnnnnnnnnnnnnnnnnnnnnnnnnnnnnnnnnnnnnnnnnnnnnnnnnnnnnnnnnnnnnnnnnnnnatcttatctaagtcgttgttttaaaacaatttaatccataattttgcttgaaatcgcgtagcccctcttacaaaagggtatacgaggcgatgtctcagcgatataaactctatcgtcgaaccagcggcatttatgttgtccgcattagcattccccaacgttttcgtcgatacgcaggacagtgtgagattcatacttcaacaggcactcacgatcttcatgaagcaaagcagaagtccgcgctcctgttggcggtctggtatcagaccttacaagagtatgaacaattggattatcgaactttaagtgactgcgccccgctgcttgctggtgagggtatgatctcgctttctaactttgctcagtcagttgagttgcctgttgcgcaattaatacaggcggtgatgaaccgtaatctgcccgtattctggctggcgacggggcaggctggcttttatgttgcagcgctctctgaggctgagctagacccgcttgatggcagttacgttcttaattatggcgaagagaagggtatcgagggggttgctaaaggctatctgcaactcactgcgcaaccagcacatttacgtaacattattagcgacggttattcagaagcttcggtgttcaaaactgccggaagcgacgctaaaggcggttggtttttcacctccggttggccggtaattaaacccgatacgcttttgatcaataaagtccatgcagaaagcctaaggcttgattggctggctaagaccacgcctccagtcgctagtgttcatcctaccgtgcctcttgccgctcctgcccctactatcgataacgagtatgttaatcgaaagtattacactaagaatctgtcgtggttatgctctgaatatctaaagcatcggcgcaagggcaaggtatcggagtcggctataagtgatatccgtaactatttcagctttatgatcgaagcgatgggtgacattcagttggaagattttgatcgcgatttcctccgggcttatgagagcaaactgcgcacgatcccagcaaaccgtaatttagtcaaagctaaatatggagtgaaaacgctggatcagttaatcgccaaagcggcagaatgcggcgataaattgatgactgaggaatccgttaggaagtatatcaacggcatttatggtgcaatgaagtgggctgttgctgacggtaagctactgaaatcgccatgcgaaaacttttttccatccgatgataaagatgagcgagatcaggatcacactgacatatttgaaccgcatgaaattaaagcgattttttcgttaccgtggtttgaggctggaactgttgaacgcaatgcgcaagggcgattccatcaatattgcccgtttaactattgggcacctttgctgggcttgatgacgggggcgcgagttaatgaaatcgctcagttactgctgagtgatgttctggcagacgacggcgtctattatttgaaccttgaaagcgataatgaaagcggaaagaaactcaaaaatgctaatgctcgccgcaagattccgctccattcaaagctgattagtctcggtttcatcgactacgtgaacgccttaaaagatgcagggtatacccgtctcttcccggagcttaaaccacataaaacaaaaggctatggtaggccagtttccgcatggttcaatgaatcgttgcttgcggggcggttgaaactcgagaggaacagaagcaaatctttccattcttttcgccactcagtttcgactttgctcaaggagaagggcgttagctcagaattacgagcgcagctacttgggcatgtgcgcggcgaaactgaaacggaagtgcgatatagcaaagacctcaaaccaattcatatgattgaagtcgtggagaaaattgatttttcgttacctgatatagcggaattcaacattcctgacgggctggatgctgtcagagatgcgttgcgaagaaagcgtggcaaacaaacaggttgaatcagttactattcagttgagtgatgcttgaatgcgctgggacgcttcctggcgcattttttattaagggtggtggatttcatagtgctgaatttggagacgctcaaaacacgtttggtgaaacttgatgacctacgattgcacccgcagcccttctacgctttctgatggtagatttatcactgttttaatgctggcctctatgttgccaatgatgtcttcgcgcgggccgctgcgccagtcatcgcttgcgtaaaaagcgtcgagaaccgtagtcatgcttttagggctgacaaaggcgcgaatcaggtaatagcagtccgggtcatgcagagagttaccaaacgaaacaacatcgatcccgtggcgttggtgtaggggaacactgatttcctgcataatggcgtgaaaagcggcaccgctgcctttgcgtaaggtgtattgcagtatctcgacggttctcaaagcattatctccgcgtcgcctctggacggctcccttgttgatagcaataaagtaaaccggactgggccatgaagctactgctaatcagacagtcatccgtaagcaaaagctgcgatatgcggttcaaacgcgctgtaaggctctctggcgagtgttttaaagaaggtagtcgaaatcatggtgcagaattcgcggcgctctcatagagtgactggcgaagccagttgaaacaagcgtagcggagttcgagcaatcaatgagaaatctgggcgagctttaagctttaccgcgcttcttaacttttgagtctgtttggctctataaggataagcctgccgccgtggaaattttcggacgctatgcctgagaggggcgcttccaaacctagggcatccactttttcgctcccaacttatctggctgcatttacaccgcgaacacgttgaacgttagcagcttctggttcgtatttggttgttacgcaggagaggtaaaaacggcaggtttacttttgacggcaacgccataagacaccaaacagcagagaagtgtaattgttaaaaatgttaaaacataacttgttctttaagatgtaaacccttcctcgggggggaagccggacatatcaaccataaggccatctgagaagatagcctgtaggttgctcggttccccttgccagatgaagatcaagtcttcctcgtggtgtgacgacctttcttgaaagatgcattatgcgcaaaagaagctactcaagaatccgccgatagctactttcaccctctgcttggctgcatcaaacgcttgcgcgccctacctaccacaatcaacgttacgcagagttcccatcctgacgtcttccgctaaacagcggtgatctccacctacccggaccggtttaccgcatgaggtaggtgtcaggagagaagctagcacaccatcattttaaagaaaagtcatatatatcatatggctgcgttcatattctgaacgcagttatcgatgttaacctaaaggtatgagaacactgtcgtttttcatatacaaagggtgcttcggctcacctgtagcgtttaagacgaagcacattgtgctctctggcaatagctgtcggacggtcgttgagcgtttgaggtgtcttccttcatttccccatgcggcgacaaccagtccggcaccgctaacaagacgtatcaagtggctatcgttatctttgccaatgggatcagacgctttcatcatttcatgtcgctgggtgtgaacgaatgcgaacaggttggccatgtatacgccaccgtagccccagcttttggcaaacgatatgcagcggctcaaggtgcgatcatccttctcagcatcggcgtatgaagggtttagccctatgaaaagggcatatggttttgattcgtcccagactcgtgataacgagtagcgatattgaccgcacggtgaaaaatcgcgtctttaatcatttcggttgtccttatgaagtgatggtttcagcctaacatgtctttatccgttttaagcgccaacaaacgaccgttttctggcacctcccaatcgcacgctttcacactgttggaaaaatagccttggcttttctggcaggccatcctaatgttggcctcgttttctggcaggggtcagatggggagataacaatggcaacttttggctacggacgtgtttcgacatcgcagcaggatactgagaaccaacggctggagcttgggcaggctgggtggcaaattgattactggtttgccgatgttgttagcgggaaggttccggcaatgcaacgtaaagcattttctgaaatgctcaataaaatccgcgatggtgaaacgttggtggtagcgaagcttgatcgtctggggcgtgatgcgattgacgtcttgcaaacggtaagggcgctggctgaccgtaatatcaaggttcttgtccaccagcttggtaacacagatctcacttctgccgctgggaagttgctattatctatgctcgccgcggttgcggagatggagcgtgatctgctgattgagcgcactcaggcgggactatcacgagcaaaagccgaaggtaagaaattgggcagacctcctaaaatcgcgtcagaagcccgtagagagattttagagaaaaagaatagcggtttgagtatcagtgcgttagcgcgtcaatatggcgtttcaagagcgactgtagcagctattaccgattgaatatggagagtttatggcttacacagcaactgttatccctgtaatgattgcttctcctggtgatgtcgctgaagagagacaagtcattcgtgaaatgatccatgagtggaatgatataaattcagctcgttcaaaagtaatgttgacaccaattggatgggaaactcatacatcacccgaattaggagttaggcctcaggagttgattaatcaaagattattagtagattgtgatttattaatcggtgtgttttggactcgtctaggctcaccgactgggaacgaggccagcggaacagtcgaagaaatccaccgtcatttgaatgcgggaaaaccggcaatgatttacttttcctcaaagcctgttgcccctgaaagccttgatagagaacaatatgagtctcttaaattgttcaaaactgagtgcatgcaaaagggattgatagagtcttttaatgacttatctgatttcaaagaaaaagtccgtaggcaactttcgataattatttctagtagcccttatttgtcttctcttatatctaccattaacaattctcctgatgcgaatacaagtcaatctttgccagaaagtaatttgtccgccgatgcactcagtttgctgaaattagcatgtgtcgatgatagcggaacaatttatgtgataaggcatttaggtggcacggatattcaagcgggaaatcaatcctttggtggaagttcggctagagaggtagcccgttgggagggcgcacttaacgaactgttatcctttgattttgtgattgaaagaggggcaaaaggacaaatgtattatgttactcataaaggctggacatttcttgaatctttaaatgaataattaaatgcgaggtcattacataagtttatttttgatgttagggtgaattccctcacatttttattcgaaagaggccgcaatgacttctcctgtttttgcgttgaaaacacaaaagtattgaagcggagctagcatccccaagctgttaactaccttagcttgttgcccaaatgcctgaataatcttcgcgttctcatcgtgccagagataagtattaaatacaggcgcttcgctttcttgccacacatggcgaaacttcgctttctcatccattacctttttgcactccctgaccgggttatggtgcgttttcgcatagcattccgggttgtcatctgcacatacgatatcttttcgtgctgtctgatgctcagcacctacagcagaaaaggcgcatacgcccagcaccaatgagagagtgcccagagcaccccatacagttgcgcgtagcgtgctgatgtgctgctttgatacagcatgggcaactacactataactggcccagctaatcgcggctcccgctgcaatcggtaataaaaagtctgctcccgtcatgattccctcactttccaaaccacatcgcgcctgatagcgaacgctggtgacgcccaaccgatgatgatcatcatacttgttgggttttaaatgtcaccattggtgtttgttttgaatcaaaaaggattgtcatgatacagccgatgaatgctagtgactaagctcgctgaagtgagattggattcaaaatatctcatatggagcgtggccttacagtggtcaaaattgcacattcagtgcatgaaaaaatccctgagaatacagtttggcgagcgggtaaaagaactgcgcattgccaccggattgagccaagaggcctttgccgatcggtgcgggtttgcacgtagttatatgagcagaattgaacgtggtggctctaatgcgtctctggatgcgattgaggtgctggctaacgctctgagcgttgagccgtggcagttgttagcgcctggcccatctgaagataacgactcggaactgttggttccatacgcagccgatggttcctgttttcaccccggtttggcgagcacccgtgatggttcgtttggcgtaggtgataaagcggctcagaagcgttttggcacgtttgctgaagctcttgagtatcttcgtagcatggagacagcaaaatggcgtaggcctaatcctagcggcaactggggtatcgtatcagcggttcggtgggacaaactgagaaagtagctcaagtgtaagtttatgaatttttatgctgtatggatgaacagtattcattagatgctgatagtcttatgtttcatcagccctttgtttctataagagtgaataaaacagcaaaatgcgggtgcgttacggtggcgtttcgctttggctcttaatggcttaattcatataaataacattgagttaaatagttattctgaacaaggtctgccggggtctaactggtttcaaaatccgaacgcagtggcgtttattcaacgtccacatagctgacaaatgttctttcctcccgactcggcagacctccagaaacattaaaaggcaggtatggcacgttgatgttttatgccgccacgaacactcggtttgattccgtccagcggatcaaacttaatatgtagcccctagaacaaaaaggtcctacgattgctctcttaacagctaacaggaacgtgattacagcaggttatagagacttaggttcgagtccggccttcggcaccaagttactaaattccttacaatacagttggttagacgattaaatctgtctcttttgcctgtaagaaatgctctgttatgtcccttgaaaaagccgctgtggttgatagtggtaattgggatgttaactcatagcggcgtgtcgttccaagcgtcaaacacgtactgactcaacttgaaagctatgacgtagccaccgtctctaaacaatcccaaaacttttagtgcagcgcattttagcccgatgcccccattctgtcgccgtcgcgagacgccgcaggggataaacaggtttatggtggtcacggtacttgcagaccatatgcaagctctgccagcggttcggcctcgctccccttgggtacatggtcatcctgataagcctcactaactgacataaccctgatgaagtcgcaagaggctccgcttgttgtcttaccaccaacggggctttatggattctattgcttaatatatgattgtatcaaacttagactgcataatttaaacgaacataacaatcaggcaggggaagaatgataaagccattttctgtgaggtatggtcatgttaacgttagagagcatgtccagctgaatgatcttaattctgatacacgcatggcattgtggaattgcttatatcttttcctttggactaacaatcgtcaaactgctacagcaacaaaatgtgcgcagtctgtgtggatatattatctaaatcaacctgcggataatattcctcgttatgaaagtggatacaaaagtgataagacgttgctgactgctatccgagattatatatatggggaagcatggtatttggtatatgatttaattgagttcatcattgagagaactaattcatatattaatctatcgaagcatctcaattccatctttaaaaagcatggcgttggttataccataataaatggttgtattactcctatttcaaatgataacgaaattgaaagtgttcagaacgcagttgataatggcactgattcatcgcgtagccatttcgaaagggcgttacaactaatgacggatagagagcagccagactacagaaactcgattaaagagtctatctctgcaattgaatctttatgcaggaaaatcacgggcaatgataaaggaaccttgggggcttgtcttaaagctatagaggaaaaaggatatatacactctgcaatgaaaggcgcttttagtcagctctatggttatacaagtgatcagggtggaatacgtcatgcgctaacagaagaagatgtaaatcctaccttagctgaagctaaatttatgttagtcacttgcagtgcgttcagtaattatctgttgtcaaaaataagtgattaattacaggtttatagttacgagtgggttagttacccactccctttaaaattattcaccagactctaatcttttttctcttttctcatctctcctttttattgccaaatcgtgttgctcttgcagatacgtgcgttcttcgtttctatcgcttgaagtatatacgtctgcttttacttttttagctccttgtgcaataggtttccaatcctctcttatacctttaatttgttctgcaatttgcgtcaatgggcttctcgctcctagataacttattccttcaaatgtcgccatgtcatacacatattcatttgtttctctatcgtttgatttaggtttgcttgcccagcttatattaatattataaatttgatctttgatttgttcatacttacagagattgctggtaagtgattgcccatttttnannnnnntnncntnnnnaanngnannnnnnntttttnnnnnnnnnncnnnnttnnnnnnngnngnnnnaannnnancnnnannntnnnngnnngnnnnntnccnnnnntnnnnannntnannnnnaannnaaaannngnccnanggnttngnnnnannnntnnnannnnnnngggnnnnnnnnnnnnnnnnnnnnntnntttttgtctcgtctgctctgaagtggtgaagtggtttactgaatttggccacctgaacagaggtgatatgctcacctcagaacaacacaggtgctccaatgaaaaaaagaaattttagcgcagagtttaaacgcgaatccgctcaactggttgttgaccagacatacacggtggcagatgccgccaaagctatggatgttggcctttccacaatgacaagatgggtcaaacaactgcgtgatgagcgtcagggcaaaacaccaaaagcctctccgataacaccagaacaaatcgaaatacgtaagctgaggaaaaagctacaacgcattgaaatggagaatgaaatattaaaaaaggctactgtagattcaatctgtcaatgcaacacccctttcaattatctctttcggtgttttgaacttcagtgtctttctcggtctgttgtttagctgagcagcaaccagatctagttcatgttgagtatattgggcaagacatgtctttttaggaaagtactgccgaattagcccatttgtgttctcatttgttccccgctgccaaggactctgaggatcgcagaagtaaactttaacgccggtgctgacagtaaattctagatgtctggccagttccattcctctgtcccatgtcagtgattttctgagttctgacggtaaactcaggaatttgtcggtaagagcctgatttactgagacagaatctttgcccctgagtctaaggatgatcgtataacgtgattttcggtctacaagtgtggctatatgagagttttttgtacctgagactaaatcgccctcccaatgccccagagagcgtctgttatcgatatttcgggaacgttcgtgaattggtgttccgttcactatgttaatcgtacctctttcgcctttgcgggtatgacgcctgccatggcgaaggctatgcgaccgtcgcagatgctgtatattcaggtggtgtagcgcttcacggctacgaaagtacagcgttttataaattgtctcaggtgatattcgcagcgttttttgacgtggttttgttcgccttaaccatcctgatatttgctctggagaccatttcatctccagcttttccagaacaagctttcgcaatggtaaattttgatccagtaagcacggttttggccttttcgccattctgttggctcggttattagcatcaacagctttgtaatagcgtctgccccgattacgctgaacttcacgtgagatcgtcgaaggactgcgattcagcgcagtagctatcgcacgaatgctcattttggctgacaaaccagctcgtatctcctcgcgctcagacagtgtcagatgagctacagcccgcttatgctcatggggttttatgccgccagtatcccttaacatagtgaagatcgttccgggttttgaacccaggatattcgctatttcactgaagcctgttccgttcttccatagttcaaaaacagaggctttttcctctgctgtaaatgttcgtctcattcaaaaaacctccgcaaccccatgttttcacataactgttgcgttgaccaattgaatctacaaccgcgctcttgatgtcagactccctgaacagttctcgataatcaggaaactcagagcgcattatcctgtggtcacactctgccatgtgttcggggttcatcgcagcagctacagatactggaaaaaccgtcctgaaaaaccagacggcagacgggctgtattacgcagccaggtacttgaactgcatggcatcagccacggctctgccggagcaagaagcatcgccacaatggcaacccggagaggctaccagatggggcactggcttgctggcagactcatgaaagagctggggctggtcagttgccagcagccgactcaccggtataagcgtggcggtcatgagcacgttgctatcccgaatcatcttgagcgacagttcgccgtaacggaaccaaatcaggtgtggtgcggtgatgtgacctatatctggacgggtaagcgctgggcgtacctcgccgttgttctcgacctgttcgcaagaaaaccagtgggctgggccatgtcgttctcgccggacagcaggcttaccatgaaagcactggaaatggcatgggaaacccgtggtaagcccgtcggggtgatgttccaggcgatcaaggcagtcattatacgagcaggcagttccggcagttactgtggcgataccggatcaggcagagtatgagtcggcgtggaaactgctgggataacagcccaatggagcgcttcttcaggagtctgaagaacgaatgggtgccagcgacgggctatgtaagcttcagcgatgcagctcacgcaataacggactatatcgttggatattacagcgcactaagaccgcacgaatataatggtgggtgaaacactgtgtcaggacatttatgaacgttctcacaccggttttatttccgatgcaacggcgaatggtctgattctcatgaaactgccggaaacctggagtacaaatgagaaaatgtttgcttccggagggcagggacatgggtttgccgctgaacggggaaaccatattgtcgacagagtccgtctgaaaaacgcacggatcctcggtgataataatgccagaaatggagcagacagactggtcagcggaacagaaatccagacgaaatattgttcaactgcagtccgtagcgtcggtgcggcattcgacggacagaacggacagtatcgttacatgggaaatcatggtcccatgcaactggaagtcccccgtgatcagtatgccggcgctgtggaaaccatgaagaataagatccgcgaaggtaaagtacccggtgtaaccgatcccgcagaagcgtcccggctgattcgtcggggacatctgacttatacccaggcccgtaatatcacccggttcgggaccatcgaatcggtcacttatgatattgccgaggggtcggttgtcagtctggcgaccggagggatcagttttgccctgacggcatcggtcttctggctcagcaccggcgatcgcgatgctgccctgcagacagctgctgtccaggcaggaaaaaccttcacccgcacactggctgtctacgtcacaacccagcaacttcaccggctcagtgttgttcagggtatgctgaagcatattgatttttcgacggccagcccgactgtccggcaggcgcttcagaaggggaccggtgcaggaaatatcagtgccctgaacaaagtgatgaagggttcgctggtgacatctctggcactggtagctgtcacaaccggccctgacatgatcaaaatgttgcggggacggatctccggtgcgcagttcatcaggaatcttgccgtggcatcttcctgtgtggcaggtggtgctgtcgggtcagtggcgggcgggatattgttcagtccactgggaccatttggtgcactgacagggcgtgtggttggcggtgttctggggggaatgattgcctccgctgtatcaggaaaaattgccggagcgctggttgaagaagatcgcgtcaaaattctggcaatgattcaggagcagatgacatggcttgccggcagtttcctgctgaccggacatgagattgaaaatctgaacgcgaatctggcccgtgttatcgatcagaatgctctggagatcattttcgccgccggtatacaacaacgggccgcgaccaacatgttaatcaaaccactggtggtcagtatcatcaggcaacgccccgtcatggaatatgatgcatcccatctcggcaatatggttaaccgactggaagaaacattacccccggagttaccggcataacggctattctgcgccttttacgttttatcacctgatttgtcagtgtcatcgtcatgactcagagaggtaaataccatgattcacctgttcaaaacctgcatgattaccgccttcattctggggttaacgtggtctgccccactccgggcacaggatcaacgttacatcagtatacgcaatacagatacgatatggctcccgggaaatatttgtgcttaccagttccggctggataatggcggaaacgatgaaggatttggccccctcaccatcactctgcaactcaaagacaaatatggtcagacgctggtgaccagaaaaatggaaacggaagcctttggtgacagtaatgccacgcgaaccacagacgcatttctggaaacggagtgcgtggaaaatgtcgccacaaccgaaatcattaaagcaactgaagaaagtaacggccatcgtgtcagtctgccgttatcggttttcgatccccaggactaccatccactgctgattaccgtttccggaaaaaatgttaactgatccctgaagtcagtttcatgcttcagcctctgccacaacgtatggcagaggctatttatcaggagaaaccagatatgccgggttacacacagagtatgtcctggctgaaggatctttctcatacgggcaggcggttgctgtcataaccgcttaccacaatgtgtttatccaggatgacccgggaatgcatttccgtcgggttatccgcaacgcggaaggtcagcgacgctgacgcagccggaactctgaagctgatgccggaaaacagcttaatgcgtggctcgccagtggagggcttctcagacaataaacctcattgatttcatccatcaggccgcgtcttctccgggagacgcggcttttttcatttattgcaccagtaaatcttaaccaccgataaggagcaaagtatgcgattagccagtcgttttggttatactgcaaaccagatacgtcgtgaccgtccactgacacatgaagagctgatgcaccatgtgccggggattttcggggaagagaaacacacgtcccgaagccagaactatacgtacatccccaccatcaccgtactggaaagcctgcagcgggaaggctttcagccattcttcgcctgccagacccgtgtgcgcgacccgggccgccggggatacaccaaacacatgctgcgtctgcggcgggccggagagataaacggagagcatgtccctgaaattattctgctcaactctcatgacggtacctccagctaccagatgctgccgggttacttcaggttcgtctgccagaacggctgcgtctgtggtcagtctcnnggggaagtgcgtgttccacaccggggagacgtagtggagaaagttattgaaggggcttacgaggtggtgggcgtgtttgaccggatagaggagaagcgtgatgccatgcagtcgctggtcctgccgccaccggcacgccaggcgctggcacaggcggcactgacttaccgttatggtgacgaacatcagcccgtcaccaccgccgacattctgacgccacgacgccgggaggattacggtaaggacctgtggagtnnnnnnnnnnnnnnnnnnnnnnnnnnnnnnnnnnnnnnnnnnnnnnnnnnnnnnnnnnnnnnnnnnnnnnnnnnnnnnnnnnnnnnnnnnnnnnnnnnnnnnnnnnnnnnnnnnnnnnnnnnnnnnnnnnnnnnnnnnnnnnnnnnnnnnnnnnnnnnnnnnnnnnnnnnnnnnnnnnnnnnnnnnnnnnnnnnnnnnnnnnnnnnnnnnnnnnnnnnnnnnnnnnnnnnnnnnnnnnnnnnnnnnnnnnnnnnnnnnnnnnnnnnnnnnnnnnnnnnnnnnnnnnnnnnnnnnnnnnnnnnnnnnnnnnnnnnnnnnnnnnnnnnnnnnnnnnnnnnnnnnnnnnnnnnnnnnnnnnnnnnnnnnnnnnnnnnnnnnnnnnnnnnnnnnnnnnnnnnnnnnnnnnnnnnnnnnnnnnnnnnnnnnnnnnnnnnnnnnnnnnnnnnnnnnnnnnnnnnnnnnnnnnnnnnnnnnnnnnnnnnnnnnnnnnnnnnnnnnnnnnnnnnnnnnnnnnnnnnnnnnnnnnnnnnnnnnnnnnnnnnnnnnnnnnnnnnnnnnnnnnnnnnnnnnnnnnnnnnnnnnnnnnnnnnnnnnnnnnnnnnnnnnnnnnnnnnnnnnnnnnnnnnnnnnnnnnnnnnnnnnnnnnnnnnnnnnnnnnnnnnnnnnnnnnnnnnnnnnnnnnnnnnnnnnnnnnnnnnnnnnnnnnnnnnnnnnnnnnnnnnnnnnnnnnnnnnnnnnnnnnnnnnnnnnnnnnnnnnnnnnnnnnnnnnnnnnnnnnnnnnnnnnnnnnnnnnnnnnnnnnnnnnnnnnnnnnnnnnnnnnnnnnnnnnnnnnnnnnnnnnnnnnnnnnnnnnnnnnnnnnnnnnnnnnnnnnnnnnnnnnnnnnnnnnnnnnnnnnnnnnnnnnnnnnnnnnnnnnnnnnnnnnnnnnnnnnnnnnnnnnnnnnnnnnnnnnnnnnnnnnnnnnnnnnnnnnnnnnnnnnnnnnnnnnnnnnnnnnnnnnnnnnnnnnnnnnnnnnnnnnnnnnnnnnnnnnnnnnnnnnnnnnnnnnnnnnnnnnnnnnnnnnnnnnnnnnnnnnnnnnnnnnnnnnnnnnnnnnnnnnnnnnnnnnnnnnnnnnnnnnnnnnnnnnnnnnnnnnnnnnnnnnnnnnnnnnnnnnnnnnnnnnnnnnnnnnnnnnnnnnnnnnnnnnnnnnnnnnnnnnnnnnnnnnnnnnnnnnnnnnnnnnnnnnnnnnnnnnnnnnnnnnnnnnnnnnnnnnnnnnnnnnnnnnnnnnnnnnnnnnnnnnnnnnnnnnnnnnnnnnnnnnnnnnnnnnnnnnnnnnnnnnnnnnnnnnnnnnnnnnnnnnnnnnnnnnnnnnnnnnnnnnnnnnnnnnnnnnnnnnnnnnnnnnnnnnnnnnnnnnnnnnnnnnnnnnnnnnnnnnnnnnnnnnnnnnnnnnnnnnnnnnnnnnnnnnnnnnnnnnnnnnnnnnnnnnnnnnnnnnnnnnnnnnnnnnnnnnnnnnnnnnnnnnnnnnnnnnnnnnnnnnnnnnnnnnnnnnnnnnnnnnnnnnnnnnnnnnnnnnnnnnnnnnnnnnnnnnnnnnnnnnnnnnnnnnnnnnnnnnnnnnnnnnnnnnnnnnnnnnnnnnnnnnnnnnnnnnnnnnnnnnnnnnnnnnnnnnnnnnnnnnnnnnnnnnnnnnnnnnnnnnnnnnnnnnnnnnnnnnnnnnnnnnnnnnnnnnnnnnnnnnnnnnnnnnnnnnnnnnnnnnnnnnnnnnnnnnnnnnnnnnnnnnnnnnnnnnnnnnnnnnnnnnnnnnnnnnnnnnnnnnnnnnnnnnnnnnnnnnnnnnnnnnnnnnnnnnnnnnnnnnnnnnnnnnnnnnnnnnnnnnnnnnnnnnnnnnnnnnnnnnnnnnnnnnnnnnnnnnnnnnnnnnnnnnnnnnnnnnnnnnnnnnnnnnnnnnnnnnnnnnnnnnnnnnnnnnnnnnnnnnnnnnnnnnnnnnnnnnnnnnnnnnnnnnnnnnnnnnnnnnnnnnnnnnnnnnnnnnnnnnnnnnnnnnnnnnnnnnnnnnnnnnnnnnnnnnnnnnnnnnnnnnnnnnnnnnnnnnnnnnnnnnnnnnnnnnnnnnnnnnnnnnnnnnnnnnnnnnnnnnnnnnnnnnnnnnnnnnnnnnnnnnnnnnnnnnnnnnnnnnnnnnnnnnnnnnnnnnnnnnnnnnnnnnnnnnnnnnnnnnnnnnnnnnnnnnnnnnnnnnnnnnnnnnnnnnnnnnnnnnnnnnnnnnnnnnnnnnnnnnnnnnnnnnnnnnnnnnnnnnnnnnnnnnnnnnnnnnnnnnnnnnnnnnnnnnnnnnnnnnnnnnnnnnnnnnnnnnnnnnnnnnnnnnnnnnnnnnnnnnnnnnnnnnnnnnnnnnnnnnnnnnnnnnnnnnnnnnnnnnnnnnnnnnnnnnnnnnnnnnnnnnnnnnnnnnnnnnnnnnnnnnnnnnnnnnnnnnnnnnnnnnnnnnnnnnnnnnnnnnnnnnnnnnnnnnnnnnnnnnnnnnnnnnnnnnnnnnnnnnnnnnnnnnnnnnnnnnnnnnnnnnnnnnnnnnnnnnnnnnnnnnnnnnnnnnnnnnnnnnnnnnnnnnnnnnnnnnnnnnnnnnnnnnnnnnnnnnnnnnnnnnnnnnnnnnnnnnnnnnnnnnnnnnnnnnnnnnnnnnnnnnnnnnnnnnnnnnnnnnnnnnnnnnnnnnnnnnnnnnnnnnnnnnnnnnnnnnnnnnnnnnnnnnnnnnnnnnnnnnnnnnnnnnnnnnnnnnnnnnnnnnnnnnnnnnnnnnnnnnnnnnnnnnnnnnnnnnnnnnnnnnnnnnnnnnnnnnnnnnnnnnnnnnnnnnnnnnnnnnnnnnnnnnnnnnnnnnnnnnnnnnnnnnnnnnnnnnnnnnnnnnnnnnnnnnnnnnnnnnnnnnnnnnnnnnnnnnnnnnnnnnnnnnnnnnnnnnnnnnnnnnnnnnnnnnnnnnnnnnnnnnnnnnnnnnnnnnnnnnnnnnnnnnnnnnnnnnnnnnnnnnnnnnnnnnnnnnnnnnnnnnnnnnnnnnnnnnnnnnnnnnnnnnnnnnnnnnnnnnnnnnnnnnnnnnnnnnnnnnnnnnnnnnnnnnnnnnnnnnnnnnnnnnnnnnnnnnnnnnnnnnnnnnnnnnnnnnnnnnnnnnnnnnnnnnnnnnnnnnnnnnnnnnnnnnnnnnnnnnnnnnnnnnnnnnnnnnnnnnnnnnnnnnnnnnnnnnnnnnnnnnnnnnnnnnnnnnnnnnnnnnnnnnnnnnnnnnnnnnnnnnnnnnnnnnnnnnnnnnnnnnnnnnnnnnnnnnnnnnnnnnnnnnnnnnnnnnnnnnnnnnnnnnnnnnnnnnnnnnnnnnnnnnnnnnnnnnnnnnnnnnnnnnnnnnnnnnnnnnnnnnnnnnnnnnnnnnnnnnnnnnnnnnnnnnnnnnnnnnnnnnnnnnnnnnnnnnnnnnnnnnnnnnnnnnnnnnnnnnnnnnnnnnnnnnnnnnnnnnnnnnnnnnnnnnnnnnnnnnnnnnnnnnnnnnnnnnnnnnnnnnnnnnnnnnnnnnnnnnnnnnnnnnnnnnnnnnnnnnnnnnnnnnnnnnnnnnnnnnnnnnnnnnnnnnnnnnnnnnnnnnnnnnnnnnnnnnnnnnnnnnnnnnnnnnnnnnnnnnnnnnnnnnnnnnnnnnnnnnnnnnnnnnnnnnnnnnnnnnnnnnnnnnnnnnnnnnnnnnnnnnnnnnnnnnnnnnnnnnnnnnnnnnnnnnnnnnnnnnnnnnnnnnnnnnnnnnnnnnnnnnnnnnnnnnnnnnnnnnnnnnnnnnnnnnnnnnnnnnnnnnnnnnnnnnnnnnnnnnnnnnnnnnnnnnnnnnnnnnnnnnnnnnnnnnnnnnnnnnnnnnnnnnnnnnnnnnnnnnnnnnnnnnnnnnnnnnnnnnnnnnnnnnnnnnnnnnnnnnnnnnnnnnnnnnnnnnnnnnnnnnnnnnnnnnnnnnnnnnnnnnnnnnnnnnnnnnnnnnnnnnnnnnnnnnnnnnnnnnnnnnnnnnnnnnnnnnnnnnnnnnnnnnnnnnnnnnnnnnnnnnnnnnnnnnnnnnnnnnnnnnnnnnnnnnnnnnnnnnnnnnnnnnnnnnnnnnnnnnnnnnnnnnnnnnnnnnnnnnnnnnnnnnnnnnnnnnnnnnnnnnnnnnnnnnnnnnnnnnnnnnnnnnnnnnnnnnnnnnnnnnnnnnnnnnnnnnnnnnnnnnnnnnnnnnnnnnnnnnnnnnnnnnnnnnnnnnnnnnnnnnnnnnnnnnnnnnnnnnnnnnnnnnnnnnnnnnnnnnnnnnnnnnnnnnnnnnnnnnnnnnnnnnnnnnnnnnnnnnnnnnnnnnnnnnnnnnnnnnnnnnnnnnnnnnnnnnnnnnnnnnnnnnnnnnnnnnnnnnnnnnnnnnnnnnnnnnnnnnnnnnnnnnnnnnnnnnnnnnnnnnnnnnnnnnnnnnnnnnnnnnnnnnnnnnnnnnnnnnnnnnnnnnntatttatattgaaagaacaatatacaatcacgataatccatccggtgggacacctgtaaaagcggctgttggtaatgcagtcatcctgctggcaaaagacgtgatatatgacgagtacttttttgatctgcggcagtcatttttcgtgagcgttaaagatctgatggcctctggcgcaaaaggtattccggagacacagaaatatccggacgtttattgctggatcccgcttttctccataaattccggcgtggtcattaccccggtctataaaattgatccccggaaacccgtaacggtaaaaaaaccggatcagatcactgttgtttgtaattacagagaataatctcagtcttctccgctcaccgcaacagtgtttacctcgctttatcttccgttcagtaaatacaaacctccgctctggcaggtacagggcgtggtttatctccggtactcccctgcacagtaataatcatcactgaaaatactgatcccgtcacggcaaaacgccatcccatattccggcaacacaaaatcatcttccgtttataccggcttcactgacaaaacagacaacctgtattgcctgtacacaacagtttctctcctggcaggaatattcccctactgattttttacgtttctccccggttgttatgccggtgaaggtggtgcgttgttttcatcatcaacgccggctgagattaacaacatccggaggagatttttatgaccaccccagtttcgctgatggatgaccagatggtcgatatgacgtttatcactcagctgaccggcctgaccgataagtggttttacaagctcatcaaggatggggcctttccggcacccatcaaactcggccgcagctcccgctggctgaaaagtgaagtggaagcctggctgcaggcgcgtattgcacagtcccgtccgtaatttttaaccactggcccttcgcccacagcagacgcaatctccggcctgccggcggcactctgctgcctgttatcccccgtgaggaatatgaaaatgaaaccacagtatcagacccgttacgagctgctccacgaaagctaccagaaatggctgaccggcttcacccggcacgccgtatcctggggcgtgtgtcatccgaatatccactacttccagaatctgacgcccgggtgggtgtcattcaatggtgaaaaaccgaagattgccatcgtaccccggagtctgcaccggctgatttatggctctgacaaacgggccacgccgcccctggatgatgatctggtggtgaacttatgcaccagcgaacatctgctggttcatcatccgatgctggaagggattctgctgtctgaatgtgaacgtctgaggcagcgttctctggcaaataaactgatcagcctcttccgtcagtttggtggcacggagttgcgcctcaaactggtctggctttgctggcttgatttaatgaccggaaacagccttgacgactggacggagaacctgaaacggaaatcagaaaaagagctgggggaatggatcatcgaccgtcagaagcagaacgcagcactgacggatctgatggatcagtacgtgctcctggcataccgcacaacggttgacggtaaccgtaactgatgccggttgtttccggaaggtgcggcaaaatacggaaatgatgatacccccggccctgcatgctcacctgcagagcgtgttcgtcgtcatcatactgagccatgacggatgtcttaagggcatcctgtcattgctgagctggcatgctgcggtacatgcctcaccctggtgacaataagtacatggcgacagcactccctgcaccgcaaaagagatgtacacggccggatgttatggctgaatgtttcttcgtcagatattcaggaacagttgtagtaacgaattttaccgatctctgtacacggccggacgccgtcagtgtatacgggcggacgttccatgctgcatgactacatccggcccggatgtcaatgagtccgtcaggaacgcttcgcttcgaaacccggcctggataccagcgccggcacgccgggaagaagttgatatggtggttgccggacaacagcgctcctggattgactgctgcatcactcaaccacgctgaatatcaaaggagagcgttaccgattaaaagagaaacggaaagctgtggtgatgacccaaaacaacacgacaatcagtgaggatggaatggtgaaaatcagactgcatcagtgtagaaaatatactggctggcatgaaaatggcccggctcgtggcgttgacatattctctcctgagcatcctgaatgactgcagttgctgtggaaaagtaagcagtctccacccacggcaccacttaacagacattcagtaactcaccccagactttctataacgcttatcggtgcactgaaaacaggagagtgcgcttaaaaccgcagaccgcattgcgggtgttactgcatgacagcctggcggtattgtgaaatgtcggcaggaaccgatgtctgcgcagggggaacttccgtgatcgggataagtgcagaagaaatcagatcacgacgtaaacctgcagtgcctgacgctgcaagtggcattaaccatgggacgttgccgatcccggattgcggaaacaggagcactattttctgccgcggggagtacctctggcagtaaatccggctcgctcatctgaccgtctctctcccggaaaagaccagaaatgagatcgtcacctcaacagcagggaagatgtcttgacagactggttatattgcatacgatttatgaagaaaaagacagcaaatatggaggctatagcggagaacaccctacgaaattcctgtgaaaaacgattgaaaaaacgatcagattcgattcgtttttatatgctttttgggcacgtggcgatgacgaactgttgcatgtgcagaggagaatgcacccggaagcaccagaatcatccagaaaggcagaacgattacgcatcaaaccaggagacagcaatatcaggataacatactgatttaaaatgaatttacagcaatacgtgaaaacattttttacttaaaggagacagatgcgctgaagacagtgcaggtatttttatataaaaatgagaaggttacgggatgtctatccagcacactatgaccggagaatatcagtcaggcttaaaaagacaataaatacagtgagttaaatacacagagaaaacgaaaacgtagtatcagagggtacatcttacaacagagactgaatttccggtttttcataaccggcacattccggaaagagcaggctaaccggaggctttctgacaccagtccctggcagtttaatctgtacatcatgtacggatgttttgttcgcatttttaaaatcggcaaaaatgcgagaagagcagctatattgtggatgaactgaaaagtgcccgggagcaacaaaaaaggcgtgatgaacgtgctgatggttccgttccgctgaaactgtccggaaaaatccacaaacagcctgaaagtattgcccgaagtcgtggtgccccccaaaaaaactgttgaatgaaatgattgagctggcgtaccaggattttgtggcaaatgagcagcacaagactcggagttaaagactgcagggccccggttaccaattctgcagcatacacaacgaatgtatccggctcttacctgtgaggggcacgaaaattatacattgagcatgagtggataatcccgggtgagagtctcccgttttacactattcactaaaggtgaggcatatcattcagtctctctgaattcttcatttcagtaacttcagctaccttcgtttcatctcccccacgaaccggggccgcagcttgttgtatcaataccaaattgttggtcattactgtcctgtatcactgggctggcaagtgaactgaaatccgcaccttaatattctgactggctgcgtacattcatggcatgaagcggccggaacggctgagctgaaggtccgttgtgagcgaacagcggacattcactacacatggttcaaacatgaaccggagctttattgtctagctgtcagtgtactgcgatttacccgctcggttgtccagaaaatcggtctgaaatccagtcattaaagggccttagcctgacattaagcaacttggtaggcggatagataatagaaataggaatgcgcaggtctgtcatgttgcctagaacggtgacaagctgtccggtgcgaaatcattccggcagcgacaggctcatgtgtcagcccgacgcccagaccgtcaacgagcatgtggatctgcgaggcgttatcgttcgcagcgatgttaaaacgaacaatctgctcatcttctagaagcacaagtgctttaatgacattaaggcggtctatatgttgcattacagacttcctattgatctttacctgaggctgaagcaaccacgttaatccgactatttttcgattgcaccatccactatcaccatcgatcttccctgagcacaacgttcaactctcccgcgtacgccgtatacctgcgcaaggctctctgcatggatcaccgtttgcgggtcgccgctgtcgataagtttcccctctttcagcatgatgacctgggcggcatgccgcagtgcgatattgatatcgtgtaagacgaccagcgtaaccatattgcgtcttcgcgtttcgcgcgatacaacatccatcacatggaactgataattgagatccagcgcgctcagtggttcatccagcaataataatgcggggcggcgaataagcgactgtgcaagccccaccagctgcttctgaccgccggacaggctatcgaggtagttcattgccagatgtgcgatgcctagctcttcgagcagcgctatagcctgcgcctgattttgcccgcnnnnnnnnnnnnnnnnnnnnnnnnnnnnnnnnnnnnnnnnnnnnnnnnnnnnnnnnnnnnnnnnnnnnnnnnnnnnnnnnnnnnnnnnnnnnnnnnnnnnnnnnnnnnnnnnnnnnnnnnnnnnnnnnnnnnnnnnnnnnnnnnnnnnnnnnnnnnnnnnnnnnnnnnnnnnnnnnnnnnnnnnnnnnnnnnnnnnnnnnnnnnnnnnnnnnnnnnnnnnnnnnnnnnnnnnnnnnnnnnnnnnnnnnnnnnnnnnnnnnnnnnnnnnnnnnnnnnnnnnnnnnnnnnnnnnnnnnnnnnnnnnnnnnnnnnnnnnnnnnnnnnnnnnnnnnnnnnnnnnnnnnnnnnnnnnnnnnnnnnnnnnnnnnnnnnnnnnnnnnnnnnnnnnnnnnnnnnnnnnnnnnnnnnnnnnnnnnnnnnnnnnnnnnnnnnnnnnnnnnnnnnnnnnnnnnnnnnnnnnnnnnnnnnnnnnnnnnnnnnnnnnnnnnnnnnnnnnnnnnnnnnnnnnnnnnnnnnnnnnnnnnnnnnnnnnnnnnnnnnnnnnnnnnnnnnnnnnnnnnnnnnnnnnnnnnnnnnnnnnnnnnnnnnnnnnnnnnnnnnnnnnnnnnnnnnnnnnnnnnnnnnnnnnnnnnnnnnnnnnnnnnnnnnnnnnnnnnnnnnnnnnnnnnnnnnnnnnnnnnnnnnnnnnnnnnnnnnnnnnnnnnnnnnnnnnnnnnnnnnnnnnnnnnnnnnnnnnnnnnnnnnnnnnnnnnnnnnnnnnnnnnnnnnnnnnnnnnnnnnnnnnnnnnnnnnnnnnnnnnnnnnnnnnnnnnnnnnnnnnnnnnnnnnnnnnnnnnnnnnnnnnnnnnnnnnnnnnnnnnnnnnnnnnnnnnnnnnnnnnnnnnnnnnnnnnnnnnnnnnnnnnnnnnnnnnnnnnnnnnnnnnnnnnnnnnnnnnnnnnnnnnnnnnnnnnnnnnnnnnnnnnnnnnnnnnnnnnnnnnnnnnnnnnnnnnnnnnnnnnnnnnnnnnnnnnnnnnnnnnnnnnnnnnnnnnnnnnnnnnnnnnnnnnnnnnnnnnnnnnnnnnnnnnnnnnnnnnnnnnnnnnnnnnnnnnnnnnnnnnnnnnnnnnnnnnnnnnnnnnnnnnnnnnnnnnnnnnnnnnnnnnnnnnnnnnnnnnnnnnnnnnnnnnnnnnnnnnnnnnnnnnnnnnnnnnnnnnnnnnnnnnnnnnnnnnnnnnnnnnnnnnnnnnnnnnnnnnnnnnnnnnnnnnnnnnnnnnnnnnnnnnnnnnnnnnnnnnnnnnnnnnnnnnnnnnnnnnnnnnnnnnnnnnnnnnnnnnnnnnnnnnnnnnnnnnnnnnnnnnnnnnnnnnnnnnnnnnnnnnnnnnnnnnnnnnnnnnnnnnnnnnnnnnnnnnnnnnnnnnnnnnnnnnnnnnnnnnnnnnnnnnnnnnnnnnnnnnnnnnnnnnnnnnnnnnnnnnnnnnnnnnnnnnnnnnnnnnnnnnnnnnnnnnnnnnnnnnnnnnnnnnnnnnnnnnnnnnnnnnnnnnnnnnnnnnnnnnnnnnnnnnnnnnnnnnnnnnnnnnnnnnnnnnnnnnnnnnnnnnnnnnnnnnnnnnnnnnnnnnnnnnnnnnnnnnnnnnnnnnnnnnnnnnnnnnnnnnnnnnnnnnnnnnnnnnnnnnnnnnnnnnnnnnnnnnnnnnnnnnnnnnnnnnnnnnnnnnnnnnnnnnnnnnnnnnnnnnnnnnnnnnnnnnnnnnnnnnnnnnnnnnnnnnnnnnnnnnnnnnnnnnnnnnnnnnnnnnnnnnnnnnnnnnnnnnnnnnnnnnnnnnnnnnnnnnnnnnnnnnnnnnnnnnnnnnnnnnnnnnnnnnnnnnnnnnnnnnnnnnnnnnnnnnnnnnnnnnnnnnnnnnnnnnnnnnnnnnnnnnnnnnnnnnnnnnnnnnnnnnnnnnnnnnnnnnnnnnnnnnnnnnnnnnnnnnnnnnnnnnnnnnnnnnnnnnnnnnnnnnnnnnnnnnnnnnnnnnnnnnnnnnnnnnnnnnnnnnnnnnnnnnnnnnnnnnnnnnnnnnnnnnnnnnnnnnnnnnnnnnnnnnnnnnnnnnnnnnnnnnnnnnnnnnnnnnnnnnnnnnnnnnnnnnnnnnnnnnnnnnnnnnnnnnnnnnnnnnnnnnnnnnnnnnnnnnnnnnnnnnnnnnnnnnnnnnnnnnnnnnnnnnnnnnnnnnnnnnnnnnnnnnnnnnnnnnnnnnnnnnnnnnnnnnnnnnnnnnnnnnnnnnnnnnnnnnnnnnnnnnnnnnnnnnnnnnnnnnnnnnnnnnnnnnnnnnnnnnnnnnnnnnnnnnnnnnnnnnnnnnnnnnnnnnnnnnnnnnnnnnnnnnnnnnnnnnnnnnnnnnnnnnnnnnnnnnnnnnnnnnnnnnnnnnnnnnnnnnnnnnnnnnnnnnnnnnnnnnnnnnnnnnnnnnnnnnnnnnnnnnnnnnnnnnnnnnnnnnnnnnnnnnnnnnnnnnnnnnnnnnnnnnnnnnnnnnnnnnnnnnnnnnnnnnnnnnnnnnnnnnnnnnnnnnnnnnnnnnnnnnnnnnnnnnnnnnnnnnnnnnnnnnnnnnnnnnnnnnnnnnnnnnnnnnnnnnnnnnnnnnnnnnnnnnnnnnnnnnnnnnnnnnnnnnnnnnnnnnnnnnnnnnnnnnnnnnnnnnnnnnnnnnnnnnnnnnnnnnnnnnnnnnnnnnnnnnnnnnnnnnnnnnnnnnnnnnnnnnnnnnnnnnnnnnnnnnnnnnnnnnnnnnnnnnnnnnnnnnnnnnnnnnnnnnnnnnnnnnnnnnnnnnnnnnnnnnnnnnnnnnnnnnnnnnnnnnnnnnnnnnnnnnnnnnnnnnnnnnnnnnnnnnnnnnnnnnnnnnnnnnnnnnnnnnnnnnnnnnnnnnnnnnnnnnnnnnnnnnnnnnnnnnnnnnnnnnnnnnnnnnnnnnnnnnnnnnnnnnnnnnnnnnnnnnnnnnnnnnnnnnnnnnnnnnnnnnnnnnnnnnnnnnnnnnnnnnnnnnnnnnnnnnnnnnnnnnnnnnnnnnnnnnnnnnnnnnnnnnnnnnnnnnnnnnnnnnnnnnnnnnnnnnnnnnnnnnnnnnnnnnnnnnnnnnnnnnnnnnnnnnnnnnnnnnnnnnnnnnnnnnnnnnnnnnnnnnnnnnnnnnnnnnnnnnnnnnnnnnnnnnnnnnnnnnnnnnnnnnnnnnnnnnnnnnnnnnnnnnnnnnnnnnnnnnnnnnnnnnnnnnnnnnnnnnnnnnnnnnnnnnnnnnnnnnnnnnnnnnnnnnnnnnnnnnnnnnnnnnnnnnnnnnnnnnnnnnnnnnnnnnnnnnnnnnnnnnnnnnnnnnnnnnnnnnnnnnnnnnnnnnnnnnnnnnnnnnnnnnnnnnnnnnnnnnnnnnnnnnnnnnnnnnnnnnnnnnnnnnnnnnnnnnnnnnnnnnnnnnnnnnnnnnnnnnnnnnnnnnnnnnnnnnnnnnnnnnnnnnnnnnnnnnnnnnnnnnnnnnnnnnnnnnnnnnnnnnnnnnnnnnnnnnnnnnnnnnnnnnnnnnnnnnnnnnnnnnnnnnnnnnnnnnnnnnnnnnnnnnnnnnnnnnnnnnnnnnnnnnnnnnnnnnnnnnnnnnnnnnnnnnnnnnnnnnnnnnnnnnnnnnnnnnnnnnnnnnnnnnnnnnnnnnnnnnnnnnnnnnnnnnnnnnnnnnnnnnnnnnnnnnnnnnnnnnnnnnnnnnnnnnnnnnnnnnnnnnnnnnnnnnnnnnnnnnnnnnnnnnnnnnnnnnnnnnnnnnnnnnnnnnnnnnnnnnnnnnnnnnnnnnnnnnnnnnnnnnnnnnnnnnnnnnnnnnnnnnnnnnnnnnnnnnnnnnnnnnnnnnnnnnnnnnnnnnnnnnnnnnnnnnnnnnnnnnnnnnnnnnnnnnnnnnnnnnnnnnnnnnnnnnnnnnnnnnnnnnnnnnnnnnnnnnnnnnnnnnnnnnnnnnnnnnnnnnnnnnnnnnnnnnnnnnnnnnnnnnnnnnnnnnnnnnnnnnnnnnnnnnnnnnnnnnnnnnnnnnnnnnnnnnnnnnnnnnnnnnnnnnnnnnnnnnnnnnnnnnnnnnnnnnnnnnnnnnnnnnnnnnnnnnnnnnnnnnnnnnnnnnnnnnnnnnnnnnnnnnnnnnnnnnnnnnnnnnnnnnnnnnnnnnnnnnnnnnnnnnnnnnnnnnnnnnnnnnnnnnnnnnnnnnnnnnnnnnnnnnnnnnnnnnnnnnnnnnnnnnnnnnnnnnnnnnnnnnnnnnnnnnnnnnnnnnnnnnnnnnnnnnnnnnnnnnnnnnnnnnnnnnnnnnnnnnnnnnnnnnnnnnnnnnnnnnnnnnnnnnnnnnnnnnnnnnnnnnnnnnnnnnnnnnnnnnnnnnnnnnnnnnnnnnnnnnnnnnnnnnnnnnnnnnnnnnnnnnnnnnnnnnnnnnnnnnnnnnnnnnnnnnnnnnnnnnnnnnnnnnnnnnnnnnnnnnnnnnnnnnnnnnnnnnnnnnnnnnnnnnnnnnnnnnnnnnnnnnnnnnnnnnnnnnnnnnnnnnnnnnnnnnnnnnnnnnnnnnnnnnnnnnnnnnnnnnnnnnnnnnnnnnnnnnnnnnnnnnnnnnnnnnnnnnnnnnnnnnnnnnnnnnnnnnnnnnnnnnnnnnnnnnnnnnnnnnnnnnnnnnnnnnnnnnnnnnnnnnnnnnnnnnnnnnnnnnnnnnnnnnnnnnnnnnnnnnnnnnnnnnnnnnnnnnnnnnnnnnnnnnnnnnnnnnnnnnnnnnnnnnnnnnnnnnnnnnnnnnnnnnnnnnnnnnnnnnnnnnnnnnnnnnnnnnnnnnnnnnnnnnnnnnnnnnnnnnnnnnnnnnnnnnnnnnnnnnnnnnnnnnnnnnnnnnnnnnnnnnnnnnnnnnnnnnnnnnnnnnnnnnnnnnnnnnnnnnnnnnnnnnnnnnnnnnnnnnnnnnnnnnnnnnnnnnnnnnnnnnnnnnnnnnnnnnnnnnnnnnnnnnnnnnnnnnnnnnnnnnnnnnnnnnnnnnnnnnnnnnnnnnnnnnnnnnnnnnnnnnnnnnnnnnnnnnnnnnnnnnnnnnnnnnnnnnnnnnnnnnnnnnnnnnnnnnnnnnnnnnnnnnnnnnnnnnnnnnnnnnnnnnnnnnnnnnnnnnnnnnnnnnnnnnnnnnnnnnnnnnnnnnnnnnnnnnnnnnnnnnnnnnnnnnnnnnnnnnnnnnnnnnnnnnnnnnnnnnnnnnnnnnnnnnnnnnnnnnnnnnnnnnnnnnnnnnnnnnnnnnnnnnnnnnnnnnnnnnnnnnnnnnnnnnnnnnnnnnnnnnnnnnnnnnnnnnnnnnnnnnnnnnnnnnnnnnnnnnnnnnnnnnnnnnnnnnnnnnnnnnnnnnnnnnnnnnnnnnnnnnnnnnnnnnnnnnnnnnnnnnnnnnnnnnnnnnnnnnnnnnnnnnnnnnnnnnnnnnnnnnnnnnnnnnnnnnnnnnnnnnnnnnnnnnnnnnnnnnnnnnnnnnnnnnnnnnnnnnnnnnnnnnnnnnnnnnnnnnnnnnnnnnnnnnnnnnnnnnnnnnnnnnnnnnnnnnnnnnnnnnnnnnnnnnnnnnnnnnnnnnnnnnnnnnnnnnnnnnnnnnnnnnnnnnnnnnnnnnnnnnnnnnnnnnnnnnnnnnnnnnnnnnnnnnnnnnnnnnnnnnnnnnnnnnnnnnnnnnnnnnnnnnnnnnnnnnnnnnnnnnnnnnnnnnnnnnnnnnnnnnnnnnnnnnnnnnnnnnnnnnnnnnnnnnnnnnnnnnnnnnnnnnnnnnnnnnnnnnnnnnnnnnnnnnnnnnnnnnnnnnnnnnnnnnnnnnnnnnnnnnnnnnnnnnnnnnnnnnnnnnnnnnnnnnnnnnnnnnnnnnnnnnnnnnnnnnnnnnnnnnnnnnnnnnnnnnnnnnnnnnnnnnnnnnnnnnnnnnnnnnnnnnnnnnnnnnnnnnnnnnnnnnnnnnnnnnnnnnnnnnnnnnnnnnnnnnnnnnnnnnnnnnnnnnnnnnnnnnnnnnnnnnnnnnnnnnnnnnnnnnnnnnnnnnnnnnnnnnnnnnnnnnnnnnnnnnnnnnnnnnnnnnnnnnnnnnnnnnnnnnnnnnnnnnnnnnnnnnnnnnnnnnnnnnnnnnnnnnnnnnnnnnnnnnnnnnnnnnnnnnnnnnnnnnnnnnnnnnnnnnnnnnnnnnnnnnnnnnnnnnnnnnnnnnnnnnnnnnnnnnnnnnnnnnnnnnnnnnnnnnnnnnnnnnnnnnnnnnnnnnnnnnnnnnnnnnnnnnnnnnnnnnnnnnnnnnnnnnnnnnnnnnnnnnnnnnnnnnnnnnnnnnnnnnnnnnnnnnnnnnnnnnnnnnnnnnnnnnnnnnnnnnnnnnnnnnnnnnnnnnnnnnnnnnnnnnnnnnnnnnnnnnnnnnnnnnnnnnnnnnnnnnnnnnnnnnnnnnnnnnnnnnnnnnnnnnnnnnnnnnnnnnnnnnnnnnnnnnnnnnnnnnnnnnnnnnnnnnnnnnnnnnnnnnnnnnnnnnnnnnnnnnnnnnnnnnnnnnnnnnnnnnnnnnnnnnnnnnnnnnnnnnnnnnnnnnnnnnnnnnnnnnnnnnnnnnnnnnnnnnnnnnnnnnnnnnnnnnnnnnnnnnnnnnnnnnnnnnnnnnnnnnnnnnnnnnnnnnnnnnnnnnnnnnnnnnnnnnnnnnnnnnnnnnnnnnnnnnnnnnnnnnnnnnnnnnnnnnnnnnnnnnnnnnnnnnnnnnnnnnnnnnnnnnnnnnnnnnnnnnnnnnnnnnnnnnnnnnnnnnnnnnnnnnnnnnnnnnnnnnnnnnnnnnnnnnnnnnnnnnnnnnnnnnnnnnnnnnnnnnnnnnnnnnnnnnnnnnnnnnnnnnnnnnnnnnnnnnnnnnnnnnnnnnnnnnnnnnnnnnnnnnnnnnnnnnnnnnnnnnnnnnnnnnnnnnnnnnnnnnnnnnnnnnnnnnnnnnnnnnnnnnnnnnnnnnnnnnnnnnnnnnnnnnnnnnnnnnnnnnnnnnnnnnnnnnnnnnnnnnnnnnnnnnnnnnnnnnnnnnnnnnnnnnnnnnnnnnnnnnnnnnnnnnnnnnnnnnnnnnnnnnnnnnnnnnnnnnnnnnnnnnnnnnnnnnnnnnnnnnnnnnnnnnnnnnnnnnnnnnnnnnnnnnnnnnnnnnnnnnnnnnnnnnnnnnnnnnnnnnnnnnnnnnnnnnnnnnnnnnnnnnnnnnnnnnnnnnnnnnnnnnnnnnnnnnnnnnnnnnnnnnnnnnnnnnnnnnnnnnnnnnnnnnnnnnnnnnnnnnnnnnnnnnnnnnnnnnnnnnnnnnnnnnnnnnnnnnnnnnnnnnnnnnnnnnnnnnnnnnnnnnnnnnnnnnnnnnnnnnnnnnnnnnnnnnnnnnnnnnnnnnnnnnnnnnnnnnnnnnnnnnnnnnnnnnnnnnnnnnnnnnnnnnnnnnnnnnnnnnnnnnnnnnnnnnnnnnnnnnnnnnnnnnnnnnnnnnnnnnnnnnnnnnnnnnnnnnnnnnnnnnnnnnnnnnnnnnnnnnnnnnnnnnnnnnnnnnnnnnnnnnnnnnnnnnnnnnnnnnnnnnnnnnnnnnnnnnnnnnnnnnnnnnnnnnnnnnnnnnnnnnnnnnnnnnnnnnnnnnnnnnnnnnnnnnnnnnnnnnnnnnnnnnnnnnnnnnnnnnnnnnnnnnnnnnnnnnnnnnnnnnnnnnnnnnnnnnnnnnnnnnnnnnnnnnnnnnnnnnnnnnnnnnnnnnnnnnnnnnnnnnnnnnnnnnnnnnnnnnnnnnnnnnnnnnnnnnnnnnnnnnnnnnnnnnnnnnnnnnnnnnnnnnnnnnnnnnnnnnnnnnnnnnnnnnnnnnnnnnnnnnnnnnnnnnnnnnnnnnnnnnnnnnnnnnnnnnnnnnnnnnnnnnnnnnnnnnnnnnnnnnnnnnnnnnnnnnnnnnnnnnnnnnnnnnnnnnnnnnnnnnnnnnnnnnnnnnnnnnnnnnnnnnnnnnnnnnnnnnnnnnnnnnnnnnnnnnnnnnnnnnnnnnnnnnnnnnnnnnnnnnnnnnnnnnnnnnnnnnnnnnnnnnnnnnnnnnnnnnnnnnnnnnnnnnnnnnnnnnnnnnnnnnnnnnnnnnnnnnnnnnnnnnnnnnnnnnnnnnnnnnnnnnnnnnnnnnnnnnnnnnnnnnnnnnnnnnnnnnnnnnnnnnnnnnnnnnnnnnnnnnnnnnnnnnnnnnnnnnnnnnnnnnnnnnnnnnnnnnnnnnnnnnnnnnnnnnnnnnnnnnnnnnnnnnnnnnnnnnnnnnnnnnnnnnnnnnnnnnnnnnnnnnnnnnnnnnnnnnnnnnnnnnnnnnnnnnnnnnnnnnnnnnnnnnnnnnnnnnnnnnnnnnnnnnnnnnnnnnnnnnnnnnnnnnnnnnnnnnnnnnnnnnnnnnnnnnnnnnnnnnnnnnnnnnnnnnnnnnnnnnnnnnnnnnnnnnnnnnnnnnnnnnnnnnnnnnnnnnnnnnnnnnnnnnnnnnnnnnnnnnnnnnnnnnnnnnnnnnnnnnnnnnnnnnnnnnnnnnnnnnnaaatctgttgcattgttcctgccccctttcagtcaataatgcgcataatggcgctgcattccggatgctgcagggcgtaatcccgcagacggtaataatgaaccgtcatggcataacactccgtacggcaggcgtgatgactgtacgtcatcagacaggcggcaatgccggcggcttccgggctcatttcagcgcggttaccgttcatgacgttaaacagcacccatgtttcgtcatcatcgtcatccggttcgggtgccataaatgcgccaccgttgttcagggtgtacagattccagataccaccgcagtagtcttcatacagacggtccatccagccgaagacccggggctccagggtcacccactgtggaatgaggccaaaatgctgcggccagaagctgatgcgctgttcatcagggactatggtggcaaccagttgttgcaggccagtctccggtgcacaggccgaagaggtggtgttctgagacaatgttttcatgtatgaaatccttgtaatgtgaataaatgagagggagtaaaggccgggggctgacaacatcacgttcatcactgaccgtgagacccggtaatgtcagggatgaatgatattcggctgaaattccggacagccgtacgcgtaaccgttccggtcacagacggatggccagatgccattgcctgtactcagtctgcacagactgagctctccggggcgtcgggtgattctggtgcctgaatcacgccttcagggacagattgcatcagcgcaggctctccagcatcgtttctgccatcacccacaatgcacggttgagcttaatgtcggtatcaatgctgtgaatggcccgggtatggatacgttttccttttgcactgcgaccggaaatcccgcctttcagcatattctcctggatggtctgataagcactccacaggtccttaccgtaatcctcccggcgtcgtggcgtcagaatgtcggcggtggtgacgggctgatgttcgtcaccataacggtaagtcagtgccgcctgtgccagcgcctggcgtgccggtggcggcaggaccagcgactgcatggcatcacgcttctcctctatccggtcaaacacgcccaccacctcgtaagccccttcaataactttctccactacgtctccccggtgtggaacacgcacttcccccagagactgaccacagacgcagccgttctggcagacgaacctgaagtaacccggcagcatctggtagctggaggtaccgtcatgagagttgagcagaataatttcagggacatgctctccgtttatctctccggcccgccgcagacgcagcatgtgtttggtgtatccccggcggcccgggtcgcgcacacgggtctggcaggcgaagaatggctgaaagccttcccgctgcaggctttccagtacggtgatggtggggatgtacgtatagttctggcttcgggacgtgtgtttctcttccccgaaaatccccggcacatggtgcatcagctcttcatgtgtcagtggacggtcacgacgtatctggtttgcagtataaccaaaacgactggctaatcgcatactttgctccttatcggtggttaagatttactggtgcaataaatgaaaaaagccgcgtctcccggagaagacgcggcctgatggatgaaatcaatnnnnnnnnnnnnnnnnnnnnnnnnnnnnnnnnnnnnnnnnnnnnnnnnnnnnnnnnnnnnnnnnnnnnnnnnnnnnnnnnnnnnnnnnnnnnnnnnnnnnnnnnnnnnnnnnnnnnnnnnnnnnnnnnnnnnnnnnnnnnnnnnnnnnnnnnnnnnnnnnnnnnnnnnnnnnnnnnnnnnnnnnnnnnnnnnnnnnnnnnnnnnnnnnnnnnnnnnnnnnnnnnnnnnnnnnnnnnnnnnnnnnnnnnnnnnnnnnnnnnnnnnnnnnnnnnnnnnnnnnnnnnnnnnnnnnnnnnnnnnnnnnnnnnnnnnnnnnnnnnnnnnnnnnnnnnnnnnnnnnnnnnnnnnnnnnnnnnnnnnnnnnnnnnnnnnnnnnnnnnnnnnnnnnnnnnnnnnnnnnnnnnnnnnnnnnnnnnnnnnnnnnnnnnnnnnnnnnnnnnnnnnnnnnnnnnnnnnnnnnnnnnnnnnnnnnnnnnnnnnnnnnnnnnnnnnnnnnnnnnnnnnnnnnnnnnnnnnnnnnnnnnnnnnnnnnnnnnnnnnnnnnnnnnnnnnnnnnnnnnnnnnnnnnnnnnnnnnnnnnnnnnnnnnnnnnnnnnnnnnnnnnnnnnnnnnnnnnnnnnnnnnnnnnnnnnnnnnnnnnnnnnnnnncctgagtggacttgaaccaccgacctcacccttatcaggggtgcgctctaaccacctgagctacaagcctgtagaggttttactgctcattttcatcagacaatctgtgtgagcactgcaaagtacgcttctttaaggtaaggaggtgatccaaccgcaggttcccctacggttaccttgttacgacttcaccccagtcatgaatcacaaagtggtaagcgccctcccgaaggttaagctacctacttcttttgcaacccactcccatggtgtgacgggcggtgtgtacaaggcccgggaacgtattcaccgtggcattctgatccacgattactagcgattccgacttcatggagtcgagttgcagactccaatccggactacgacgcactttatgaggtccgcttgctctcgcgagatcgcttctctttgtatgcgccattgtagcacgtgtgtagccctggtcgtaagggccatgatgacaaacccagctcgcgtaccactttaaatggcgaacagccatacccttgggacctacttcagccccaggatgtgatgagccgacatcgaggtgccaaacaccgccgtcgatatgaactcttgggcggtatcagcctgttatccccggagtaccttttatccgttgagcgatggcccttccattcagaaccaccggatcactatgacctgctttcgcacctgctcgcgccgtcacgctcgcagtcaagctggcttatgccattgcactaacctcctgatgtccgaccaggattagccaaccttcgtgctcctccgttactctttaggaggagaccgccccagtcaaactacccaccagacactgtccgcaacccggattacgggccaacgttagaacatcaaacattaaagggtggtatttcaaggtcggctccatgcagactggcgtccacacttcaaagcctcccacctatcctacacatcaaggctcaatgttcagtgtcaagctatagtaaaggttcacggggtctttccgtcttgccgcgggtacactgcatcttcacagcgagttcaatttcannnnnnnnnnnnnnnnnnnnnnnnnnnnnnnnnnnnnnnnnnnnnnnnnnnnnnnnnnnnnnnnnnnnnnnnnnnnnnnnnnnnnnnnnnnnnnnnnnnnnnnnnnnnnnnnnnnnnnnnnnnnnnnnnnnnnnnnnnnnnnnnnnnnnnnnnnnnnnnnnnnnnnnnnnnnnnnnnnnnnnnnnnnnnnnnnnnnnnnnnnnnnnnnnnnnnnnnnnnnnnnnnnnnnnnnnnnnnnnnnnnnnnnnnnnnnnnnnnnnnnnnnnnnnnnnnnnnnnnnnnnnnnnnnnnnnnnnnnnnnnnnnnnnnnnnnnnnnnnnnnnnnnnnnnnnnnnnnnnnnnnnnnnnnnnnnnnnnnnnnnnnnnnnnnnnnnnnnnnnnnnnnnnnnnnnnnnnnnnnnnnnnnnnnnnnnnnnnnnnnnnnnnnnnnnnnnnnnnnnnnnnnnnnnnnnnnnnnnnnnnnnnnnnnnnnnnnnnnnnnnnnnnnnnnnnnnnnnnnnnnnnnnnnnnnnnnnnnnnnnnnnnnnnnnnnnnnnnnnnnnnnnnnnnnnnnnnnnnnnnnnnnnnnnnnnnnnnnnnnnnnnnnnnnnnnnnnnnnnnnnnnnnnnnnnnnnnnnnnnnnnnnnnnnnnnnnnnnnnnnnnnnnnnnnnnnnnnnnnnnnnnnnnnnnnnnnnnnnnnnnnnnnnnnnnnnnnnnnnnnnnnnnnnnnnnnnnnnnnnnnnnnnnnnnnnnnnnnnnnnnnnnnnnnnnnnnnnnnnnnnnnnnnnnnnnnnnnnnnnnnnnnnnnnnnnnnnnnnnnnnnnnnnnnnnnnnnnnnnnnnnnnnnnnnnnnnnnnnnnnnnnnnnnnnnnnnnnnnnnnnnnnnnnnnnnnnnnnnnnnnnnnnnnnnnnnnnnnnnnnnnnnnnnnnnnnnnnnnnnnnnnnnnnnnnnnnnnnnnnnnnnnnnnnnnnnnnnnnnnnnnnnnnnnnnnnnnnnnnnnnnnnnnnnnnnnnnnnnnnnnnnnnnnnnnnnnnnnnnnnnnnnnnnnnnnnnnnnnnnnnnnnnnnnnnnnnnnnnnnnnnnnnnnnnnnnnnnnnnnnnnnnnnnnnnnnnnnnnnnnnnnnnnnnnnnnnnnnnnnnnnnnnnnnnnnnnnnnnnnnnnnnnnnnnnnnnnnnnnnnnnnnnnnnnnnnnnnnnnnnnnnnnnnnnnnnnnnnnnnnnnnnnnnnnnnnnnnnnnnnnnnnnnnnnnnnnnnnnnnnnnnnnnnnnnnnnnnnnnnnnnnnnnnnnnnnnnnnnnnnnnnnnnnnnnnnnnnnnnnnnnnnnnnnnnnnnnnnnnnnnnnnnnnnnnnnnnnnnnnnnnnnnnnnnnnnnnnnnnnnnnnnnnnnnnnnnnnnnnnnnnnnnnnnnnnnnnnnnnnnnnnnnnnnnnnnnnnnnnnnnnnnnnnnnnnnnnnnnnnnnnnnnnnnnnnnnnnnnnnnnnnnnnnnnnnnnnnnnnnnnnnnnnnnnnnnnnnnnnnnnnnnnnnnnnnnnnnnnnnnnnnnnnnnnnnnnnnnnnnnnnnnnnnnnnnnnnnnnnnnnnnnnnnnnnnnnnnnnnnnnnnnnnnnnnnnnnnnnnnnnnnnnnnnnnnnnnnnnnnnnnnnnnnnnnnnnnnnnnnnnnnnnnnnnnnnnnnnnnnnnnnnnnnnnnnnnnnnnnnnnnnnnnnnnnnnnnnnnnnnnnnnnnnnnnnnnnnnnnnnnnnnnnnnnnnnnnnnnnnnnnnnnnnnnnnnnnnnnnnnnnnnnnnnnnnnnnnnnnnnnnnnnnnnnnnnnnnnnnnnnnnnnnnnnnnnnnnnnnnnnnnnnnnnnnnnnnnnnnnnnnnnnnnnnnnnnnnnnnnnnnnnnnnnnnnnnnnnnnnnnnnnnnnnnnnnnnnnnnnnnnnnnnnnnnnnnnnnnnnnnnnnnnnnnnnnnnnnnnnnnnnnnnnnnnnnnnnnnnnnnnnnnnnnnnnnnnnnnnnnnnnnnnnnnnnnnnnnnnnnnnnnnnnnnnnnnnnnnnnnnnnnnnnnnnnnnnnnnnnnnnnnnnnnnnnnnnnnnnnnnnnnnnnnnnnnnnnnnnnnnnnnnnnnnnnnnnnnnnnnnnnnnnnnnnnnnnnnnnnnnnnnnnnnnnnnnnnnnnnnnnnnnnnnnnnnnnnnnnnnnnnnnnnnnnnnnnnnnnnnnnnnnnnnnnnnnnnnnnnnnnnnnnnnnnnnnnnnnnnnnnnnnnnnnnnnnnnnnnnnnnnnnnnnnnnnnnnnnnnnnnnnnnnnnnnnnnnnnnnnnnnnnnnnnnnnnnnnnnnnnnnnnnnnnnnnnnnnnnnnnnnnnnnnnnnnnnnnnnnnnnnnnnnnnnnnnnnnnnnnnnnnnnnnnnnnnnnnnnnnnnnnnnnnnnnnnnnnnnnnnnnnnnnnnnnnnnnnnnnnnnnnnnnnnnnnnnnnnnnnnnnnnnnnnnnnnnnnnnnnnnnnnnnnnnnnnnnnnnnnnnnnnnnnnnnnnnnnnnnnnnnnnnnnnnnnnnnnnnnnnnnnnnnnnnnnnnnnnnnnnnnnnnnnnnnnnnnnnnnnnnnnnnnnnnnnnnnnnnnnnnnnnnnnnnnnnnnnnnnnnnnnnnnnnnnnnnnnnnnnnnnnnnnnnnnnnnnnnnnnnnnnnnnnnnnnnnnnnnnnnnnnnnnnnnnnnnnnnnnnnnnnnnnnnnnnnnnnnnnnnnnnnnnnnnnnnnnnnnnnnnnnnnnnnnnnnnnnnnnnnnnnnnnnnnnnnnnnnnnnnnnnnnnnnnnnnnnnnnnnnnnnnnnnnnnnnnnnnnnnnnnnnnnnnnnnnnnnnnnnnnnnnnnnnnnnnnnnnnnnnnnnnnnnnnnnnnnnnnnnnnnnnnnnnnnnnnnnnnnnnnnnnnnnnnnnnnnnnnnnnnnnnnnnnnnnnnnnnnnnnnnnnnnnnnnnnnnnnnnnnnnnnnnnnnnnnnnnnnnnnnnnnnnnnnnnnnnnnnnnnnnnnnnnnnnnnnnnnnnnnnnnnnnnnnnnnnnnnnnnnnnnnnnnnnnnnnnnnnnnnnnnnnnnnnnnnnnnnnnnnnnnnnnnnnnnnnnnnnnnnnnnnnnnnnnnnnnnnnnnnnnnnnnnnnnnnnnnnnnnnnnnnnnnnnnnnnnnnnnnnnnnnnnnnnnnnnnnnnnnnnnnnnnnnnnnnnnnnnnnnnnnnnnnnnnnnnnnnnnnnnnnnnnnnnnnnnnnnnnnnnnnnnnnnnnnnnnnnnnnnnnnnnnnnnnnnnnnnnnnnnnnnnnnnnnnnnnnnnnnnnnnnnnnnnnnnnnnnnnnnnnnnnnnnnnnnnnnnnnnnnnnnnnnnnnnnnnnnnnnnnnnnnnnnnnnnnnnnnnnnnnnnnnnnnnnnnnnnnnnnnnnnnnnnnnnnnnnnnnnnnnnnnnnnnnnnnnnnnnnnnnnnnnnnnnnnnnnnnnnnnnnnnnnnnnnnnnnnnnnnnnnnnnnnnnnnnnnnnnnnnnnnnnnnnnnnnnnnnnnnnnnnnnnnnnnnnnnnnnnnnnnnnnnnnnnnnnnnnnnnnnnnnnnnnnnnnnnnnnnnnnnnnnnnnnnnnnnnnnnnnnnnnnnnnnnnnnnnnnnnnnnnnnnnnnnnnnnnnnnnnnnnnnnnnnnnnnnnnnnnnnnnnnnnnnnnnnnnnnnnnnnnnnnnnnnnnnnnnnnnnnnnnnnnnnnnnnnnnnnnnnnnnnnnnnnnnnnnnnnnnnnnnnnnnnnnnnnnnnnnnnnnnnnnnnnnnnnnnnnnnnnnnnnnnnnnnnnnnnnnnnnnnnnnnnnnnnnnnnnnnnnnnnnnnnnnnnnnnnnnnnnnnnnnnnnnnnnnnnnnnnnnnnnnnnnnnnnnnnnnnnnnnnnnnnnnnnnnnnnnnnnnnnnnnnnnnnnnnnnnnnnnnnnnnnnnnnnnnnnnnnnnnnnnnnnnnnnnnnnnnnnnnnnnnnnnnnnnnnnnnnnnnnnnnnnnnnnnnnnnnnnnnnnnnnnnnnnnnnnnnnnnnnnnnnnnnnnnnnnnnnnnnnnnnnnnnnnnnnnnnnnnnnnnnnnnnnnnnnnnntcgtgatacctgtcgtaaagcagtaaaaggctggcgaataattcgccagtcccgtctacccttgtagtacccctacagcaaggagacggtcatgaccaataaccccccttcaacgcgtatttaccccggcgagtatggttaccccctgaagttaaaagcccgatacgataactttatcggtggtgactgggtcgcccccgtggacggcgagtattaccaaaacctgacgccggtaaccgggcaattactgtgcgaagtggcctcttccggcaaaaaggacatcgatctggcactggatgccgcgcataaagtaaaagataaatgggcgcagacttccgtgcaggacagggcggcgattttgttcaaaattgccgatcgtatggagcaaaatctggagctgctggcaacggctgaaacctgggataacggtaaacccatccgcgaaaccagcgcggccgatgtgccgctggcaattgaccatttccgctattttgcctcctgtattcgtgcgcaggaagggggaatcagcgaggttgatagcgaaaccgtggcttatcacttccatgaacctcttggcgtggtagggcaaattatcccgtggaacttcccgctgctgatggccagctggaagatggcacccgcgctggcggcgggtaactgcgtggtgctgaaacccgcgcgcctgacgccgctgtccgtactgttgctgatggaagtcatcggcgatctgctcccgcctggcgtggtgaacgtggtcaacggcgcgggtggggagatcggtgagtatctggcgacgtcaaaacgtattgcgaaagtggcgtttaccggctcaacggaagttgggcagcagatcatgcagtacgccacgcagaacattattcctgtcacgctggaactgggcgggaaatcacccaatatcttcttcgcggacgtgatggatgaagaagatgcgttctttgacaaagcgctggaaggttttgcattgtttgccttcaaccagggcgaagtgtgtacctgtccgagtcgtgcgctggttcaggaatccatttatgaacgttttatggaaagagccattcgtcgggtggaaagtatccgtagcggcaacccgttagacagcgtgacgcaaatgggcgcgcaggtgtcgcatggtcaactggaaactattctgaattacatcgacattggtaagaaagaaggagcagatgttctcaccggcgggcggcgcaagcagctggatggcgagttaaaagaggggtactacctcgaaccaaccattctgtttggtaagaacaacatgcgggttttccaggaggagatcttcgggccggtgctggctgtcacaacgtttaaaaccatggaagaggcgctggaaatcgctaatgacacccaatatgggcttggcgctggtgtctggagtcgtaatggaaatctggcgtacaaaatgggacgtgggattcaggcggggcgagtttggaccaactgttaccatgcgtatccggcacatgcggcgtttggtggctataagcagtcgggcatcgggcgcgagacgcataagatgatgcttgaacattatcagcaaaccaagtgcctgttggtgagctactctgataaaccactggggctgttnnnnnnnnnnnnnnnnnnnnnnnnnnnnnnnnnnnnnnnnnnnnnnnnnnnnnnnnnnnnnnnnnnnnnnnnnnnnnnnnnnnnnnnnnnnnnnnnnnnnnnnnnnnnnnnnnnnnnnnnnnnnnnnnnnnnnnnnnnnnnnnnnnnnnnnnnnnnnnnnnnnnnnnnnnnnnnnnnnnnnnnnnnnnnnnnnnnnnnnnnnnnnnnnnnnnnnnnnnnnnnnnnnnnnnnnnnnnnnnnnnnnnnnnnnnnnnnnnnnnnnnnnnnnnnnnnnnnnnnnnnnnnnnnnnnnnnnnnnnnnnnnnnnnnnnnnnnnnnnnnnnnnnnnnnnnnnnnnnnnnnnnnnnnnnnnnnnnnnnnnnnnnnnnnnnnnnnnnnnnnnnnnnnnnnnnnnnnnnnnnnnnnnnnnnnnnnnnnnnnnnnnnnnnnnnnnnnnnnnnnnnnnnnnnnnnnnnnnnnnnnnnnnnnnnnnnnnnnnnnnnnnnnnnnnnnnnnnnnnnnnnnnnnnnnnnnnnnnnnnnnnnnnnnnnnnnnnnnnnnnnnnnnnnnnnnnnnnnnnnnnnnnnnnnnnnnnnnnnnnnnnnnnnnnnnnnnnnnnnnnnnnnnnnnnnnnnnnnnnnnnnnnnnnnnnnnnnnnnnnnnnnnnnnnnnnnnnnnnnnnnnnnnnnnnnnnnnnnnnnnnnnnnnnnnnnnnnnnnnnnnnnnnnnnnnnnnnnnnnnnnnnnnnnnnnnnnnnnnnnnnnnnnnnnnnnnnnnnnnnnnnnnnnnnnnnnnnnnnnnnnnnnnnnnnnnnnnnnnnnnnnnnnnnnnnnnnnnnnnnnnnnnnnnnnnnnnnnnnnnnnnnnnnnnnnnnnnnnnnnnnnnnnnnnnnnnnnnnnnnnnnnnnnnnnnnnnnnnnnnnnnnnnnnnnnnnnnnnnnnnnnnnnnnnnnnnnnnnnnnnnnnnnnnnnnnnnnnnnnnnnnnnnnnnnnnnnnnnnnnnnnnnnnnnnnnnnnnnnnnnnnnnnnnnnnnnnnnnnnnnnnnnnnnnnnnnnnnnnnnnnnnnnnnnnnnnnnnnnnnnnnnnnnnnnnnnnnnnnnnnnnnnnnnnnnnnnnnnnnnnnnnnnnnnnnnnnnnnnnnnnnnnnnnnnnnnnnnnnnnnnnnnnnnnnnnnnnnnnnnnnnnnnnnnnnnnnnnnnnnnnnnnnnnnnnnnnnnnnnnnnnnnnnnnnnnnnnnnnnnnnnnnnnnnnnnnnnnnnnnnnnnnnnnnnnnnnnnnnnnnnnnnnnnnnnnnnnnnnnnnnnnnnnnnnnnnnnnnnnnnnnnnnnnnnnnnnnnnnnnnnnnnnnnnnnnnnnnnnnnnnnnnnnnnnnnnnnnnnnnnnnnnnnnnnnnnnnnnnnnnnnnnnnnnnnnnnnnnnnnnnnnnnnnnnnnnnnnnnnnnnnnnnnnnnnnnnnnnnnnnnnnnnnnnnnnnnnnnnnnnnnnnnnnnnnnnnnnnnnnnnnnnnnnnnnnnnnnnnnnnnnnnnnnnnnnnnnnnnnnnnnnnnnnnnnnnnnnnnnnnnnnnnnnnnnnnnnnnnnnnnnnnnnnnnnnnnnnnnnnnnnnnnnnnnnnnnnnnnnnnnnnnnnnnnnnnnnnnnnnnnnnnnnnnnnnnnnnnnnnnnnnnnnnnnnnnnnnnnnnnnnnnnnnnnnnnnnnnnnnnnnnnnnnnnnnnnnnnnnnnnnnnnnnnnnnnnnnnnnnnnnnnnnnnnnnnnnnnnnnnnnnnnnnnnnnnnnnnnnnnnnnnnnnnnnnnnnnnnnnnnnnnnnnnnnnnnnnnnnnnnnnnnnnnnnnnnnnnnnnnnnnnnnnnnnnnnnnnnnnnnnnnnnnnnnnnnnnnnnnnnnnnnnnnnnnnnnnnnnnnnnnnnnnnnnnnnnnnnnnnnnnnnnnnnnnnnnnnnnnnnnnnnnnnnnnnnnnnnnnnnnnnnnnnnnnnnnnnnnnnnnnnnnnnnnnnnnnnnnnnnnnnnnnnnnnnnnnnnnnnnnnnnnnnnnnnnnnnnnnnnnnnnnnnnnnnnnnnnnnnnnnnnnnnnnnnnnnnnnnnnnnnnnnnnnnnnnnnnnnnnnnnnnnnnnnnnnnnnnnnnnnnnnnnnnnnnnnnnnnnnnnnnnnnnnnnnnnnnnnnnnnnnnnnnnnnnnnnnnnnnnnnnnnnnnnnnnnnnnnnnnnnnnnnnnnnnnnnnnnnnnnnnnnnnnnnnnnnnnnnnnnnnnnnnnnnnnnnnnnnnnnnnnnnnnnnnnnnnnnnnnnnnnnnnnnnnnnnnnnnnnnnnnnnnnnnnnnnnnnnnnnnnnnnnnnnnnnnnnnnnnnnnnnnnnnnnnnnnnnnnnnnnnnnnnnnnnnnnnnnnnnnnnnnnnnnnnnnnnnnnnnnnnnnnnnnnnnnnnnnnnnnnnnnnnnnnnnnnnnnnnnnnnnnnnnnnnnnnnnnnnnnnnnnnnnnnnnnnnnnnnnnnnnnnnnnnnnnnnnnnnnnnnnnnnnnnnnnnnnnnnnnnnnnnnnnnnnnnnnnnnnnnnnnnnnnnnnnnnnnnnnnnnnnnnnnnnnnnnnnnnnnnnnnnnnnnnnnnnnnnnnnnnnnnnnnnnnnnnnnnnnnnnnnnnnnnnnnnnnnnnnnnnnnnnnnnnnnnnnnnnnnnnnnnnnnnnnnnnnnnnnnnnnnnnnnnnnnnnnnnnnnnnnnnnnnnnnnnnnnnnnnnnnnnnnnnnnnnnnnnnnnnnnnnnnnnnnnnnnnnnnnnnnnnnnnnnnnnnnnnnnnnnnnnnnnnnnnnnnnnnnnnnnnnnnnnnnnnnnnnnnnnnnnnnnnnnnnnnnnnnnnnnnnnnnnnnnnnnnnnnnnnnnnnnnnnnnnnnnnnnnnnnnnnnnnnnnnnnnnnnnnnnnnnnnnnnnnnnnnnnnnnnnnnnnnnnnnnnnnnnnnnnnnnnnnnnnnnnnnnnnnnnnnnnnnnnnnnnnnnnnnnnnnnnnnnnnnnnnnnnnnnnnnnnnnnnnnnnnnnnnnnnnnnnnnnnnnnnnnnnnnnnnnnnnnnnnnnnnnnnnnnnnnnnnnnnnnnnnnnnnnnnnnnnnnnnnnnnnnnnnnnnnnnnnnnnnnnnnnnnnnnnnnnnnnnnnnnnnnnnnnnnnnnnnnnnnnnnnnnnnnnnnnnnnnnnnnnnnnnnnnnnnnnnnnnnnnnnnnnnnnnnnnnnnnnnnnnnnnnnnnnnnnnnnnnnnnnnnnnnnnnnnnnnnnnnnnnnnnnnnnnnnnnnnnnnnnnnnnnnnnnnnnnnnnnnnnnnnnnnnnnnnnnnnnnnnnnnnnnnnnnnnnnnnnnnnnnnnnnnnnnnnnnnnnnnnnnnnnnnnnnnnnnnnnnnnnnnnnnnnnnnnnnnnnnnnnnnnnnnnnnnnnnnnnnnnnnnnnnnnnnnnnnnnnnnnnnnnnnnnnnnnnnnnnnnnnnnnnnnnnnnnnnnnnnnnnnnnnnnnnnnnnnnnnnnnnnnnnnnnnnnnnnnnnnnnnnnnnnnnnnnnnnnnnnnnnnnnnnnnnnnnnnnnnnnnnnnnnnnnnnnnnnnnnnnnnnnnnnnnnnnnnnnnnnnnnnnnnnnnnnnnnnnnnnnnnnnnnnnnnnnnnnnnnnnnnnnnnnnnnnnnnnnnnnnnnnnnnnnnnnnnnnnnnnnnnnnnnnnnnnnnnnnnnnnnnnnnnnnnnnnnnnnnnnnnnnnnnnnnnnnnnnnnnnnnnnnnnnnnnnnnnnnnnnnnnnnnnnnnnnnnnnnnnnnnnnnnnnnnnnnnnnnnnnnnnnnnnnnnnnnnnnnnnnnnnnnnnnnnnnnnnnnnnnnnnnnnnnnnnnnnnnnnnnnnnnnnnnnnnnnnnnnnnnnnnnnnnnnnnnnnnnnnnnnnnnnnnnnnnnnnnnnnnnnnnnnnnnnnnnnnnnnnnnnnnnnnnnnnnnnnnnnnnnnnnnnnnnnnnnnnnnnnnnnnnnnnnnnnnnnnnnnnnnnnnnnnnnnnnnnnnnnnnnnnnnnnnnnnnnnnnnnnnnnnnnnnnnnnnnnnnnnnnnnnnnnnnnnnnnnnnnnnnnnnnnnnnnnnnnnnnnnnnnnnnnnnnnnnnnnnnnnnnnnnnnnnnnnnnnnnnnnnnnnnnnnnnnnnnnnnnnnnnnnnnnnnnnnnnnnnnnnnnnnnnnnnnnnnnnnnnnnnnnnnnnnnnnnnnnnnnnnnnnnnnnnnnnnnnnnnnnnnnnnnnnnnnnnnnnnnnnnnnnnnnnnnnnnnnnnnnnnnnnnnnnnnnnnnnnnnnnnnnnnnnnnnnnnnnnnnnnnnnnnnnnnnnnnnnnnnnnnnnnnnnnnnnnnnnnnnnnnnnnnnnnnnnnnnnnnnnnnnnnnnnnnnnnnnnnnnnnnnnnnnnnnnnnnnnnnnnnnnnnnnnnnnnnnnnnnnnnnnnnnnnnnnnnnnnnnnnnnnnnnnnnnnnnnnnnnnnnnnnnnnnnnnnnnnnnnnnnnnnnnnnnnnnnnnnnnnnnnnnnnnnnnnnnnnnnnnnnnnnnnnnnnnnnnnnnnnnnnnnnnnnnnnnnnnnnnnnnnnnnnnnnnnnnnnnnnnnnnnnnnnnnnnnnnnnnnnnnnnnnnnnnnnnnnnnnnnnnnnnnnnnnnnnnnnnnnnnnnnnnnnnnnnnnnnnnnnnnnnnnnnnnnnnnnnnnnnnnnnnnnnnnnnnnnnnnnnnnnnnnnnnnnnnnnnnnnnnnnnnnnnnnnnnnnnnnnnnnnnnnnnnnnnnnnnnnnnnnnnnnnnnnnnnnnnnnnnnnnnnnnnnnnnnnnnnnnnnnnnnnnnnnnnnnnnnnnnnnnnnnnnnnnnnnnnnnnnnnnnnnnnnnnnnnnnnnnnnnnnnnnnnnnnnnnnnnnnnnnnnnnnnnnnnnnnnnnnnnnnnnnnnnnnnnnnnnnnnnnnnnnnnnnnnnnnnnnnnnnnnnnnnnnnnnnnnnnnnnnnnnnnnnnnnnnnnnnnnnnnnnnnnnnnnnnnnnnnnnnnnnnnnnnnnnnnnnnnnnnnnnnnnnnnnnnnnnnnnnnnnnnnnnnnnnnnnnnnnnnnnnnnnnnnnnnnnnnnnnnnnnnnnnnnnnnnnnnnnnnnnnnnnnnnnnnnnnnnnnnnnnnnnnnnnnnnnnnnnnnnnnnnnnnnnnnnnnnnnnnnnnnnnnnnnnnnnnnnnnnnnnnnnnnnnnnnnnnnnnnnnnnnnnnnnnnnnnnnnnnnnnnnnnnnnnnnnnnnnnnnnnnnnnnnnnnnnnnnnnnnnnnnnnnnnnnnnnnnnnnnnnnnnnnnnnnnnnnnnnnnnnnnnnnnnnnnnnnnnnnnnnnnnnnnnnnnnnnnnnnnnnnnnnnnnnnnnnnnnnnnnnnnnnnnnnnnnnnnnnnnnnnnnnnnnnnnnnnnnnnnnnnnnnnnnnnnnnnnnnnnnnnnnnnnnnnnnnnnnnnnnnnnnnnnnnnnnnnnnnnnnnnnnnnnnnnnnnnnnnnnnnnnnnnnnnnnnnnnnnnnnnnnnnnnnnnnnnnnnnnnnnnnnnnnnnnnnnnnnnnnnnnnnnnnnnnnnnnnnnnnnnnnnnnnnnnnnnnnnnnnnnnnnnnnnnnnnnnnnnnnnnnnnnnnnnnnnnnnnnnnnnnnnnnnnnnnnnnnnnnnnnnnnnnnnnnnnnnnnnnnnnnnnnnnnnnnnnnnnnnnnnnnnnnnnnnnnnnnnnnnnnnnnnnnnnnnnnnnnnnnnnnnnnnnnnnnnnnnnnnnnnnnnnnnnnnnnnnnnnnnnnnnnnnnnnnnnnnnnnnnnnnnnnnnnnnnnnnnnnnnnnnnnnnnnnnnnnnnnnnnnnnnnnnnnnnnnnnnnnnnnnnnnnnnnnnnnnnnnnnnnnnnnnnnnnnnnnnnnnnnnnnnnnnnnnnnnnnnnnnnnnnnnnnnnnnnnnnnnnnnnnnnnnnnnnnnnnnnnnnnnnnnnnnnnnnnnnnnnnnnnnnnnnnnnnnnnnnnnnnnnnnnnnnnnnnnnnnnnnnnnnnnnnnnnnnnnnnnnnnnnnnnnnnnnnnnnnnnnnnnnnnnnnnnnnnnnnnnnnnnnnnnnnnnnnnnnnnnnnnnnnnnnnnnnnnnnnnnnnnnnnnnnnnnnnnnnnnnnnnnnnnnnnnnnnnnnnnnnnnnnnnnnnnnnnnnnnnnnnnnnnnnnnnnnnnnnnnnnnnnnnnnnnnnnnnnnnnnnnnnnnnnnnnnnnnnnnnngaaacgtgctatccagcagcagatcgaaaacccgctggcacagcaaatactgtctggtgaattggttccgggtaaagttattnnnnnnnnnnnnnnnnnnnnnnnnnnnnnnnnnnnnnnnnnnnnnnnnnnnnnnnnnnnnnnnnnnnnnnnnnnnnnnnnnnnnnnnnnnnnnnnnnnnnnnnnnnnnnnnnnnnnnnnnnnnnnnnnnnnnnnnnnnnnnnnnnnnnnnnnnnnnnnnnnnnnnnnnnnnnnnnnnnnnnnnnnnnnnnnnnnnnnnnnnnnnnnnnnnnnnnnnnnnnnnnnnnnnnnnnnnnnnnnnnnnnnnnnnnnnnnnnnnnnnnnnnnnnnnnnnnnnnnnnnnnnnnnnnnnnnnnnnnnnnnnnnnnnnnnnnnnnnnnnnnnnnnnnnnnnnnnnnnnnnnnnnnnnnnnnnnnnnnnnnnnnnnnnnnnnnnnnnnnnnnnnnnnnnnnnnnnnnnnnnnnnnnnnnnnnnnnnnnnnnnnnnnnnnnnnnnnnnnnnnnnnnnnnnnnnnnnnnnnnnnnnnnnnnnnnnnnnnnnnnnnnnnnnnnnnnnnnnnnnnnnnnnnnnnnnnnnnnnnnnnnnnnnnnnnnnnnnnnnnnnnnnnnnnnnnnnnnnnnnnnnnnnnnnnnnnnnnnnnnnnnnnnnnnnnnnnnnnnnnnnnnnnnnnnnnnnnnnnnnnnnnnnnnnnnnnnnnnnnnnnnnnnnnnnnnnnnnnnnnnnnnnnnnnnnnnnnnnnnnnnnnnnnnnnnnnnnnnnnnnnnnnnnnnnnnnnnnnnnnnnnnnnnnnnnnnnnnnnnnnnnnnnnnnnnnnnnnnnnnnnnnnnnnnnnnnnnnnnnnnnnnnnnnnnnnnnnnnnnnnnnnnnnnnnnnnnnnnnnnnnnnnnnnnnnnnnnnnnnnnnnnnnnnnnnnnnnnnnnnnnnnnnnnnnnnnnnnnnnnnnnnnnnnnnnnnnnnnnnnnnnnnnnnnnnnnnnnnnnnnnnnnnnnnnnnnnnnnnnnnnnnnnnnnnnnnnnnnnnnnnnnnnnnnnnnnnnnnnnnnnnnnnnnnnnnnnnnnnnnnnnnnnnnnnnnnnnnnnnnnnnnnnnnnnnnnnnnnnnnnnnnnnnnnnnnnnnnnnnnnnnnnnnnnnnnnnnnnnnnnnnnnnnnnnnnnnnnnnnnnnnnnnnnnnnnnnnnnnnnnnnnnnnnnnnnnnnnnnnnnnnnnnnnnnnnnnnnnnnnnnnnnnnnnnnnnnnnnnnnnnnnnnnnnnnnnnnnnnnnnnnnnnnnnnnnnnnnnnnnnnnnnnnnnnnnnnnnnnnnnnnnnnnnnnnnnnnnnnnnnnnnnnnnnnnnnnnnnnnnnnnnnnnnnnnnnnnnnnnnnnnnnnnnnnnnnnnnnnnnnnnnnnnnnnnnnnnnnnnnnnnnnnnnnnnnnnnnnnnnnnnnnnnnnnnnnnnnnnnnnnnnnnnnnnnnnnnnnnnnnnnnnnnnnnnnnnnnnnnnnnnnnnnnnnnnnnnnnnnnnnnnnnnnnnnnnnnnnnnnnnnnnnnnnnnnnnnnnnnnnnnnnnnnnnnnnnnnnnnnnnnnnnnnnnnnnnnnnnnnnnnnnnnnnnnnnnnnnnnnnnnnnnnnnnnnnnnnnnnnnnnnnnnnnnnnnnnnnnnnnnnnnnnnnnnnnnnnnnnnnnnnnnnnnnnnnnnnnnnnnnnnnnnnnnnnnnnnnnnnnnnnnnnnnnnnnnnnnnnnnnnnnnnnnnnnnnnnnnnnnnnnnnnnnnnnnnnnnnnnnnnnnnnnnnnnnnnnnnnnnnnnnnnnnnnnnnnnnnnnnnnnnnnnnnnnnnnnnnnnnnnnnnnnnnnnnnnnnnnnnnnnnnnnnnnnnnnnnnnnnnnnnnnnnnnnnnnnnnnnnnnnnnnnnnnnnnnnnnnnnnnnnnnnnnnnnnnnnnnnnnnnnnnnnnnnnnnnnnnnnnnnnnnnnnnnnnnnnnnnnnnnnnnnnnnnnnnnnnnnnnnnnnnnnnnnnnnnnnnnnnnnnnnnnnnnnnnnnnnnnnnnnnnnnnnnnnnnnnnnnnnnnnnnnnnnnnnnnnnnnnnnnnnnnnnnnnnnnnnnnnnnnnnnnnnnnnnnnnnnnnnnnnnnnnnnnnnnnnnnnnnnnnnnnnnnnnnnnnnnnnnnnnnnnnnnnnnnnnnnnnnnnnnnnnnnnnnnnnnnnnnnnnnnnnnnnnnnnnnnnnnnnnnnnnnnnnnnnnnnnnnnnnnnnnnnnnnnnnnnnnnnnnnnnnnnnnnnnnnnnnnnnnnnnnnnnnnnnnnnnnnnnnnnnnnnnnnnnnnnnnnnnnnnnnnnnnnnnnnnnnnnnnnnnnnnnnnnnnnnnnnnnnnnnnnnnnnnnnnnnnnnnnnnnnnnnnnnnnnnnnnnnnnnnnnnnnnnnnnnnnnnnnnnnnnnnnnnnnnnnnnnnnnnnnnnnnnnnnnnnnnnnnnnnnnnnnnnnnnnnnnnnnnnnnnnnnnnnnnnnnnnnnnnnnnnnnnnnnnnnnnnnnnnnnnnnnnnnnnnnnnnnnnnnnnnnnnnnnnnnnnnnnnnnnnnnnnnnnnnnnnnnnnnnnnnnnnnnnnnnnnnnnnnnnnnnnnnnnnnnnnnnnnnnnnnnnnnnnnnnnnnnnnnnnnnnnnnnnnnnnnnnnnnnnnnnnnnnnnnnnnnnnnnnnnnnnnnnnnnnnnnnnnnnnnnnnnnnnnnnnnnnnnnnnnnnnnnnnnnnnnnnnnnnnnnnnnnnnnnnnnnnnnnnnnnnnnnnnnnnnnnnnnnnnnnnnnnnnnnnnnnnnnnnnnnnnnnnnnnnnnnnnnnnnnnnnnnnnnnnnnnnnnnnnnnnnnnnnnnnnnnnnnnnnnnnnnnnnnnnnnnnnnnnnnnnttggtggagccaagcgggatcgaaccgctgacctcctgcatgccatgcaggcgctctcccagctgagctatggccccangaaactccggatgatctgccgggagcagagtccgttttgaaactggcgtccccacggggattcgaaccccggtcgccaccgtgaaagggtgatgtcctaggcctctagacgatggggacgcacgaaaaacttcaagttgtagaaccttcgacggcctaatgtcgaaagtggtggagccaagcgggatcgaaccgctgacctcctgcatgccatgcaggcgctctcccagctgagctatggccccnnnnnnnnnnnnnnnnnnnnnnnnnnnnnnnnnnnnnnnnnnnnnnnnnnnnnnnnnnnnnnnnnnnnnnnnnnnnnnnnnnnnnnnnnnnnnnnnnnnnnnnnnnnnnnnnnnnnnnnnnnnnnnnnnnnnnnnnnnnnnnnnnnnnnnnnnnnnnnnnnnnnnnnnnnnnnnnnnnnnnnnnnnnnnnnnnnnnnnnnnnnnnnnnnnnnnnnnnnnnnnnnnnnnnnnnnnnnnnnnnnnnnnnnnnnnnnnnnnnnnnnnnnnnnnnnnnnnnnnnnnnnnnnnnnnnnnnnnnnnnnnnnnnnnnnnnnnnnnnnnnnnnnnnnnnnnnnnnnnnnnnnnnnnnnnnnnnnnnnnnnnnnnnnnnnnnnnnnnnnnnnnnnnnnnnnnnnnnnnnnnnnnnnnnnnnnnnnnnnnnnnnnnnnnnnnnnnnnnnnnnnnnnnnnnnnnnnnnnnnnnnnnnnnnnnnnnnnnnnnnnnnnnnnnnnnnnnnnnnnnnnnnnnnnnnnnnnnnnnnnnnnnnnnnnnnnnnnnnnnnnnnnnnnnnnnnnnnnnnnnnnnnnnnnnnnnnnnnnnnnnnnnnnnnnnnnnnnnnnnnnnnnnnnnnnnnnnnnnnnnnnnnnnnnnnnnnnnnnnnnnnnnnnnnnnnnnnnnnnnnnnnnnnnnnnnnnnnnnnnnnnnnnnnnnnnnnnnnnnnnnnnnnnnnnnnnnnnnnnnnnnnnnnnnnnnnnnnnnnnnnnnnnnnnnnnnnnnnnnnnnnnnnnnnnnnnnnnnnnnnnnnnnnnnnnnnnnnnnnnnnnnnnnnnnnnnnnnnnnnnnnnnnnnnnnnnnnnnnnnnnnnnnnnnnnnnnnnnnnnnnnnnnnnnnnnnnnnnnnnnnnnnnnnnnnnnnnnnnnnnnnnnnnnnnnnnnnnnnnnnnnnnnnnnnnnnnnnnnnnnnnnnnnnnnnnnnnnnnnnnnnnnnnnnnnnnnnnnnnnnnnnnnnnnnnnnnnnnnnnnnnnnnnnnnnnnnnnnnnnnnnnnnnnnnnnnnnnnnnnnnnnnnnnnnnnnnnnnnnnnnnnnnnnnnnnnnnnnnnnnnnnnnnnnnnnnnnnnnnnnnnnnnnnnnnnnnnnnnnnnnnnnnnnnnnnnnnnnnnnnnnnnnnnnnnnnnnnnnnnnnnnnnnnnnnnnnnnnnnnnnnnnnnnnnnnnnnnnnnnnnnnnnnnnnnnnnnnnnnnnnnnnnnnnnnnnnnnnnnnnnnnnnnnnnnnnnnnnnnnnnnnnnnnnnnnnnnnnnnnnnnnnnnnnnnnnnnnnnnnnnnnnnnnnnnnnnnnnnnnnnnnnnnnnnnnnnnnnnnnnnnnnnnnnnnnnnnnnnnnnnnnnnnnnnnnnnnnnnnnnnnnnnnnnnnnnnnnnnnnnnnnnnnnnnnnnnnnnnnnnnnnnnnnnnnnnnnnnnnnnnnnnnnnnnnnnnnnnnnnnnnnnnnnnnnnnnnnnnnnnnnnnnnnnnnnnnnnnnnnnnnnnnnnnnnnnnnnnnnnnnnnnnnnnnnnnnnnnnnnnnnnnnnnnnnnnnnnnnnnnnnnnnnnnnnnnnnnnnnnnnnnnnnnnnnnnnnnnnnnnnnnnnnnnnnnnnnnnnnnnnnnnnnnnnnnnnnnnnnnnnnnnnnnnnnnnnnnnnnnnnnnnnnnnnnnnnnnnnnnnnnnnnnnnnnnnnnnnnnnnnnnnnnnnnnnnnnnnnnnnnnnnnnnnnnnnnnnnnnnnnnnnnnnnnnnnnnnnnnnnnnnnnnnnnnnnnnnnnnnnnnnnnnnnnnnnnnnnnnnnnnnnnnnnnnnnnnnnnnnnnnnnnnnnnnnnnnnnnnnnnnnnnnnnnnnnnnnnnnnnnnnnnnnnnnnnnnnnnnnnnnnnnnnnnnnnnnnnnnnnnnnnnnnnnnnnnnnnnnnnnnnnnnnnnnnnnnnnnnnnnnnnnnnnnnnnnnnnnnnnnnnnnnnnnnnnnnnnnnnnnnnnnnnnnnnnnnnnnnnnnnnnnnnnnnnnnnnnnnnnnnnnnnnnnnnnnnnnnnnnnnnnnnnnnnnnnnnnnnnnnnnnnnnnnnnnnnnnnnnnnnnnnnnnnnnnnnnnnnnnnnnnnnnnnnnnnnnnnnnnnnnnnnnnnnnnnnnnnnnnnnnnnnnnnnnnnnnnnnnnnnnnnnnnnnnnnnnnnnnnnnnnnnnnnnnnnnnnnnnnnnnnnnnnnnnnnnnnnnnnnnnnnnnnnnnnnnnnnnnnnnnnnnnnnnnnnnnnnnnnnnnnnnnnnnnnnnnnnnnnnnnnnnnnnnnnnnnnnnnnnnnnnnnnnnnnnnnnnnnnnnnnnnnnnnnnnnnnnnnnnnnnnnnnnnnnnnnnnnnnnnnnnnnnnnnnnnnnnnnnnnnnnnnnnnnnnnnnnnnnnnnnnnnnnnnnnnnnnnnnnnnnnnnnnnnnnnnnnnnnnnnnnnnnnnnnnnnnnnnnnnnnnnnnnnnnnnnnnnnnnnnnnnnnnnnnnnnnnnnnnnnnnnnnnnnnnnnnnnnnnnnnnnnnnnnnnnnnnnnnnnnnnnnnnnnnnnnnnnnnnnnnnnnnnnnnnnnnnnnnnnnnnnnnnnnnnnnnnnnnnnnnnnnnnnnnnnnnnnnnnnnnnnnnnnnnnnnnnnnnnnnnnnnnnnnnnnnnnnnnnnnnnnnnnnnnnnnnnnnnnnnnnnnnnnnnnnnnnnnnnnnnnnnnnnnnnnnnnnnnnnnnnnnnnnnnnnnnnnnnnnnnnnnnnnnnnnnnnnnnnnnnnnnnnnnnnnnnnnnnnnnnnnnnnnnnnnnnnnnnnnnnnnnnnnnnnnnnnnnnnnnnnnnnnnnnnnnnnnnnnnnnnnnnnnnnnnnnnnnnnnnnnnnnnnnnnnnnnnnnnnnnnnnnnnnnnnnnnnnnnnnnnnnnnnnnnnnnnnnnnnnnnnnnnnnnnnnnnnnnnnnnnnnnnnnnnnnnnnnnnnnnnnnnnnnnnnnnnnnnnnnnnnnnnnnnnnnnnnnnnnnnnnnnnnnnnnnnnnnnnnnnnnnnnnnnnnnnnnnnnnnnnnnnnnnnnnnnnnnnnnnnnnnnnnnnnnnnnnnnnnnnnnnnnnnnnnnnnnnnnnnnnnnnnnnnnnnnnnnnnnnnnnnnnnnnnnnnnnnnnnnnnnnnnnnnnnnnnnnnnnnnnnnnnnnnnnnnnnnnnnnnnnnnnnnnnnnnnnnnnnnnnnnnnnnnnnnnnnnnnnnnnnnnnnnnnnnnnnnnnnnnnnnnnnnnnnnnnnnnnnnnnnnnnnnnnnnnnnnnnnnnnnnnnnnnnnnnnnnnnnnnnnnnnnnnnnnnnnnnnnnnnnnnnnnnnnnnnnnnnnnnnnnnnnnnnnnnnnnnnnnnnnnnnnnnnnnnnnnnnnnnnnnnnnnnnnnnnnnnnnnnnnnnnnnnnnnnnnnnnnnnnnnnnnnnnnnnnnnnnnnnnnnnnnnnnnnnnnnnnnnnnnnnnnnnnnnnnnnnnnnnnnnnnnnnnnnnnnnnnnnnnnnnnnnnnnnnnnnnnnnnnnnnnnnnnnnnnnnnnnnnnnatgctgccaacttactgatttagtgtatgatggtgtttttgaggtgctccagtggcttctgtttctatcagctgtccctcctgttcagctactgacggggtggtgcgtaacggcaaaagcaccgccggacatcagcgctatctctgctctcactgccgtaaaacatggcaactgcagttcacttacaccgcttctcaacccggtacgcaccagaaaatcattgatatggccatgaatggcgttggatgccgggcaacagcccgcattatgggcgttggcctcaacacgattttacgtcacttaaaaaactcaggccgcagtcggtaacctcgcgcatacagccgggcagtgacgtcatcgtctgcgcggaaatgggcgaacagtggggctatgtcggggctaaatcgcgccagcgctggctgttttacgcgtatgacaggctccggaagacggttgttgcgcacgtattcggtgaacgcacgatggcgacgctggggcgtcttatgagcctgctgtcaccctttgacgtggtgatatggatgacggatggctggccgctgtatgaatcccgcctgaagggaaagctgcacgtaatcagcaagcgatatacgcagcgaattgagcggcataacctgaatctgaggcagcacctggcacggctgggacggaagtcgctgtcgttctcaaaatcggtggagctgcatgacaaagtcatcgggcattatctgaacataaaacactatcaataagttggagtcattaccnacattgtcaagatgaacagcatgcattgtaacagtctgcagtttatgttctccgtggataattattcttatttcatggtgatttttgttatattttaaaatgcatatctcaccatttagtttttatatcacaaaaacatagtaatgcaatcatacacacctgcctctatcgtacagagaaaacgggcaattatttgtattattccttcataacgacttcagtatacaggatgaccgcaaccacgctccttctcctgcccgggcgaagtgcctggttcagacaattacattaactggctgaaattttcgacgcggtacaggcctccctgctttgaaaggtggcctggcgctgcaattttttacttttgtttttgtatccggaaaaacacatctgcaagaatcattattctcttgcctgaagctatccagcatcctcagatatttcgcactttatgagctggcatcagaaaaatgtgccagtaactttttattaatgacttcaaacagttcctgttcatcatgggtcagataatcccagatttctttcagatacatgctttgtgcaagagtgagcctctgaataaaaaacataccttcagatgtcagactgatttttttagcacggcgatcctccctgctatccgtcctttttacatatccggctttttctaaaaaatctgtaatgcgggtaatattagttctggtaaactgaagtttctggcttatctctgaaggtgacagacaatggttctccgctgcgaataatgtggtgagaaccatatatgctgagtgatttattccatacacccccagaaattcagatatattatcctgcattcttttatttgtgcgaatacagagctgcatcaacaaatgttcccgaaagggatatgcggggtctttgtttttttggtgtctgattattttttctaatgtgtctgtgttattcatttcattattctccatattactgaaacacactgtctgtgtacaagcgcgcatcagtcatccggtaaacatcgactttccactacaatttattcctacctgatttctgtatgacagagtagtcccgacaggcagacggataaattcccgcaggtaaaagaacataaatgctggctgctgacaagtctgtgaaaaaggattattgtagtggttcacaaaatcaggacaccggaataacctgtttccacttttcttcatgtaagcaaggcggtaaaccatcgttgttcgtgtgaggtcgataaacgttgtaggtaatgactccaacttattgatagtgttttatgttcagataatgcccgatgactttgtcatgcagctccaccgattttgagaacgacagcgacttccgtcccagccgtgccaggtgctgcctcagattcaggttatgccgctcaattcgctgcgtatatcgcttgctgattacgtgcagctttcccttcaggcgggattcatacagcggccagccatccgtcatccatatcaccacgtcaaagggtgacagcaggctcataagacgccccagcgtcgccatcgtgcgttcaccgaatacgtgcgcaacaaccgtcttccggagcctgtcatacgcgtaaaacagccagcgctggcgcgatttagccccgacatagccccactgttcgcccatttccgcgcagacgatgacgtcactgcccggctgtatgcgcgaggttaccgactgcggcctgagttttttaagtgacgtaaaatcgtgttgaggccaacgcccataatgcgggctgttgcccggcatccaacgccattcatggccatatcaatgattttctggtgcgtaccgggttgagaagcggtgtaagtgaactgcagttgccatgttttacggcagtgagagcagagatagcgctgatgtccggcggtgcttttgccgttacgcaccaccccgtcagtagctgaacaggagggacagctgatagaaacagaagccactggagcacctcaaaaacaccatcatacactaaatcagtaagttggcagcatcaccggttgcgactgcagaaaaagcaccctcagtgacttgggcattattggctgacgacttcttaacaatcgcagtataatgcagcacattatcaccatctttcagggtattagcatcaccttctgtgccatcgaaagaaacgtttttacctgcagcctgaactacaatcgcagtacctgtccccccgctggtatctaactcctcattatgaccagaaacccttggaccactaaaagccagcttcacagtccctttttttgctgccgagactcctccccccccttaaatgaagtgatatcacaattaaccaattcaatatctaaattcattggtttggatacgcctcctgcttgaaggaagctttttgaaagctgtccaaaatcaatagactgatcagctgatttctgagaaatgctgcatggagtctcatccgtggataatacggaaacgcactgcacaggactctgcggtttacgtcgccattcaatcccataagcttcaagtgatgtcttccctcagtgctgctaattcatcactgtcagatttatgaaccatattcgttacctgtatccgaaccactgaagcaccacagcagaaattcgggtcccctacactgattacagcgccccctctgctgcctattaactcaagcacctcccaacaacttacggaaacttaattctaatacagctgtaattcagttgtgtcgtggtcggccgcggttacttttttcgggaagtctgctacgcatcagaataataccgtgttctttctgatcctgtttagccaggtagctaagggcgtaacgtaaaccgttagactggccccctgaatctccagacaaccaatatcacttaaataagtgatagtcttaatactagtttttagactagtcattggagaacagatgattgatgtcttagggccggagaaacgcagacggcgtactacacaggaaaagatcgctatcgttcagcagagctttgaaccgggaatgacggtctcccttgttgcccggcaacatggtgtggcagccagccagttatttctctggcgtaagcaataccaggagggaagtcttactgctgtggctgccggagaacaggtcgttcctgcctctgaacttgctgccgccatgaagcagattaaagaactccagcgtctgctcggcaaaaaaacgatggaaaatgaactccttaaagaagccgttgaatatgggcgagcaaaaaagtggatagcgcacgcgcccttattgcccggggatggggagtaagcttcgtcagccgttgtctccgggtgtcgcgtgcgcagttgcacgtcattctcagacgagccgatgactggaaggacggccgccgcagccgtcacacggatgatacggatgtgcttcgccgtatacaccatgttatcggagagctacccacatatggttatcgtcgggtatgggcgctgcttcgcagacaaacagaacttgatggtatgcctgcgatcaatgccaaacgtatttaccggatcatgcgccagaatgcgctgttgcttgagcgaaaaaccgctgtaccgccatcgaaacgggcacataccggcagagtggctgtgaaagaaagtaatcagcgatggtgctctgacgggttcgagttccgctgtgataacggagaaaaactgcgggtcacgttcgcgctggactgctgtgaccgtgaggcactgcactgggcggtcactacgggcggcttcaacagtgaaacagtacaggacgtcatgctgggagcggtggaacgccgcttcggcaacgagcttccggcgtctccagtagagtggctgacggataatggttcatgctaccgggctaatgaaacacggcagtttgcccggatgttggggcttgaaccgaaaaacacggcggtgcggagtccggagagtaacggcatagcagagagcttcgtgaaaacgataaagcgtgactacataagtatcatacccaaaccagacgggttaacggcagcaaagaaccttgcagaggcgttcgagcattataacgaatggcatccgcatagtgcgttgggttatcgctcgccacgggaatatctgcggcagcgggcctgtaatgggttaagtgataacagatgtctggaaatataggggcaaatccaggaggtagcctgagtttaacggacactccttcctgaaatagaatggcatcagaaggagctaataatgagcagaaaaacccaacgttactctaaagagttcaaagccgaagctgtcagaacggttcttgaaaatcaactttcgatcagtgaaggcgcttcccgattatctcttcctgaaggcactttaggacaatgggttaccgccgccagaaaagggctcggtactcctggttcccgcacggtggctgaactggaatctgaaattctgcaactgcgtaaggcgttaaatgaagctcgccttgagcgagatatattaaaaaaagcaactgtagattcaattggtcaacgcaacagttatgtgaaaacatggggttgcggaggttttttgaatgagacgaacatttacagcagaggaaaaagcctctgtttttgaactatggaagaacggaacaggcttcagtgaaatagcgaatatcctgggttcaaaacccggaacgatcttcactatgttaagggatactggcggcataaaaccccatgagcgtaagcgggctgtagctcacctgacactgtctgagcgcgaggagatacgagctggtttgtcagccaaaatgagcattcgtgcgatagctactgcgctgaatcgcagtccttcgacgatctcacgtgaagttcagcgtaatcggggcagacgctattacaaagctgttgatgctaataaccgagccaacagaatggcgaaaaggccaaaaccgtgcttactggatcaaaatttaccattgcgaaagcttgttctggaaaagctggagatgaaatggtctccagagcaaatatcaggatggttaaggcgaacaaaaccacgtcaaaaaacgctgcgaatatcacctgagacaatttataaaacgctgtactttcgtagccgtgaagcgctacaccacctgaatatacagcatctgcgacggtcgcatagccttcgccatggcaggcgtcatacccgcaaaggcgaaagaggtacgattaacatagtgaacggaacaccaattcacgaacgttcccgaaatatcgataacagacgctctctgggacattgggagggcgatttagtctcaggtacaaaaaactctcatatagccacacttgtagaccgaaaatcacgttatacgatcatccttagactcaggggcaaagattctgtctcagtaaatcaggctcttaccgacaaattcctgagtttaccgtcagaactcagaaaatcactgacatgggacagaggaatggaactggccagacatctagaatttactgtcagcaccggcgttaaagtttacttctgcgatcctcagagtccttggcagcggggaacaaatgagaacacaaatgggctaattcggcagtactttcctaaaaagacatgtcttgcccaatatactcaacatgaactagatctggttgctgctcagctaaacaacagaccgagaaagacactgtgaagtggtcaacaaaaactggccaccgagttagagttttttccagtatcgattttccgattcgtttggtggtaacccaccattatattcgtgcggtcttagtgcgctgtaatatccaacgatatagtccgttattgcgtgagctgcatcgttcaaaaataagattaatgagaaaatcactccttgaataccgtagagcgttacttatatgttcaaaaagcttaactcgttcgccatttttaaaataacgagattgaattgttagataacaaacaattttaatataagtatccaacataccaacttttctaagagaatctgcatatcccaataaataagaaaactcattgccagaattctgagctgatacattcttagatagttcaagtacattgtcgtattcgtttattcttttgtgaataaggttatcgttaccttttaaaggcgagtttttatgttgaagatcaactttctccttatgaattgataataaaaaatcaagagcaccaatatttgtccctaatttctttttacgttcaactaaatttatatattctgcgttcatacattcacttaatgataaataaaatgagaataaaactgcatttactaaatattataaatataaatctttaaaaacatcactaaaactcaacgaatgtcacagtgtaagctcacagagatattgcaattatctccggacaagcgagggaaatgctaagttgatgcaacgtatctgcggcggatatttgaggcattaccatgccaacatctatgtgatgaaacactttgttatacctgagattacaaaattaaggatgaaaaaatatacttctgggagaaacatgagatcaatacagttgcggaagtttttgctgtatccacacgaacgctgtattatggcccagaggcacctatttcgcgtagcaaagctccgctagtacatcgcacaaagcaatggcatctcgtaattctgtaagaaatacgtcgactgagaatagagcttcccaacctagaagaacagatttttgtttgcttgaagccgtggagtgaacagcaccgcctggtctgtccgagcatttcaaccatcggcaggatgttcacggccgcacacgataaaatgcgactgataccgatgtgactgcctccccaaggaaaaacactgttcataaaaaatacaatcctccaacccgcagatcaaaacgctatcgcccggtaaagagcagtgagctcgttggtatagatgctattgagctcagaatgggcgagctgcgctgttatgtcattaccatgatcgacgaacacagcaactacgctctggcacaggccgtgccgtcacttaactgtgatatcatcaaactcttcttttgccgtgcagaccggctattccctatcgatatcaaccagggcatcgcagataacgggaaagagttcccaggaaacttcgacaaagcaccgcaggaatccgctagcaagccctatggacctacccctttacgcctagaacgcacctctgaacgttttaagcgaacgccgaaagaacagttcattgaatttaaataaatagactctttaaagagctaaacatatttaatcagaaactagctgaaaacctagtactatactgcagtaaaagacagcatgaagtgctcgaattactgacaccagaagaaaatattttacgagagaacaaaatttgcaatatgtggcgaatctatacggtcacttgcaaaagtataaattggtattataatgcgtgatattatataaataaaataactaactattttaacgaaagcaaaacaccacaaagagaaaaataaaatttgcaatatatctcattagggttcacatttttaacagcccttgattttagctctcctatatttataaacaacaacaattaacttaaatggaagggtaatgaatccaaatatcgaattagcactggagataatagcctgccctaattgataagataaatgtttcttaactctttcagccttatcagcatcagcatataaatagagtggcacatcaacgccataactcttcttacgttttttttcaaaaacacactcacggataagtgcaaatggcatggtaataatccccttgagggatttagaatacgagactataatataaccaagtcgataacctaactcttgttttatctgctcagctgctccatatagcacaggtggaagtttctttttaatttcctgattttctataaaatagtgttccaactgctcttgcactatatgcaattgttttaaaatctgttctttttctgatattgcctgagtgagttttgattctttttcgcttatctcttcttcatatttatgcaattgttttaaaatctgttctttttctgatattgcctgagtgagttttgattctttttcgcttatctcttcttcatatttctgtatgtcatttatttttttttcaatatcatctggatatttttcttgtctcacaacatcgttgtgatttatttttgaaagtttaattacctcttccttttctttttttagctcattaatcctgttcaataataaaaattgtcttttcttaaatatagatttagtcaattcaatatctgcatccttcttttttgactcttgcaccaaatgagatacaatattgaagatagaatttctctcttcgactacctcccataatgcagcctcagccgaaacgttatctttcgatgtttctatataaggtaggtttgcataggcttgtaactcattataaagcttcagaacctcggttctttcttttattaattcagatactaagtactcactaacctttgtatcattaaatgtaatttcagtctcatttgcacttaaagaaaataaagttgtatatttttcaagcagggcaatttcatttgattttgtataatcattattctcaaccacatcaaacaatattgaatttttgtaatgcgcagacattagattatctatttttataatattactcaatggctttataatatttttcttattgctttgaaacgcctcaaaattaatcaacacacatcgttctttattctccaaaaaaaaatcaagcaatcttttattatatgcaatccagttatctacactattatttatatttaaagagagaggggcattatttactgaacgcattaaattatatttagggtgatcatatatcatgatgaattttatgcttttatctatatttttccaaaaatcaagaaaaaatattatagatggatctgcccacccccaaagtttgttatttagattgttcatcattagttcaagaaccatgctatcccacatggttgagacttgaacagctgagaattctctctcatctactacatcattaacttctggtgtttgataaaattgacataatgaagcggtgatatattctggggaaattttattacttgtagaataatttggtgagttcatgccaatttctttcaaaaaatgttcaactatctgatactttgagccaggatgtccgactagcactaatttattcatcatatttcctctttattatctacaagattactttattttaaacactgtcgtttatcgtaatggtgatattgcagacatatatttcaaatctgtaatgtaatttaggtggcgttatgtgataatactaaatgaaactatctatatctcaatagcacatctgatttatttggtatagccattcatcaataaacaatatcaatataactcagagcacctcctaataattgacatattgcgttaccaccttcttttagacaaaaatcttaattataaactctaccaaactaacgctgatatttttcaaaatcataaaacaaatggtttaaataagtatataacaaaatatcaacgtacaactatttaaaacaagtatttatactataaacttcagaaaccaacacaaaatacaggaatgtgaataaaaaagtaagtttttacccttccacattatacactaattcgaggttaagttttgaatatcctgcgattgcttgtgtttcttttatgatgtctaaaggccatttttttgtaaatgtgttccaaagtccttccattgaacctgatgagacctctcttagccagtttttttctctgggaacacatatcataccaatttcattctctaacatatagcgagaaaatctaacatcgacgaatcgttgagaaccatccatatattttaaagatggtaattgatctgccttaagaaaaacagtccctgtacctaattgatttacaactctcggtcgcaatagcccttgagtaaatgaaaatacttttcttttagactgatctccatcaaatgcatctatgtatatacagccatgaatcccaacaatgcaattgaatattgcaaaggaattataaaaattgagcattttttctacataatcgggagggtaaataatatcatcatctgtaagtacgatcatatcatttttagcgcaaggaaatataaatttgcccacatccttataatctttatctggaataactggatttaattttgaaaaaccatctaattcctcaggaatttcttcaaactcattcaggcaaagattaattttatctacttgagcatgtaaactttgtatagaatgcaccaactctttttttcgaggtgggtatgatgacatatttgcaacaatcatggggtaatattttaattaatattgcatgttaatgaaaactatcaacgtattgatagtcgtttatttataggaaatgcttaataaacagaacacattaagttgattagaatgactccgcacctcatggacgatatgtttaattaaaaataactactagggtgtacgtttgatatatttatcttcatctaaattattactcttaccatatcaaaccactctttgcataaacatttcctgtaactatctaaaaataaattggcagataattaattaaagaataacagcaacgtattacgagatcacgatcaaattcataattgcctagttcaaagtatactgtccatcctcctcatacactaaatacaatagagtttatataattatatagagtgtgattacaatctccggcaatgacactgttagtgcaacagtaatcaggcctccctcttagtattgcttacgctgaaagaataactggcagcctgccacaccatgttgtctggcaacgaggaagaccgccattttcggttcaaggctctgctgaaaaatagcgattttcctgtgtggcacgctgtctgcgtttctctgcttctaagacaccaattatctattctccaactactagtctaaaagactagtatcactactatcagttatttaaatgatattgattgcctagagattcagggagctagtctagttattcagagaacggtatcttaacaattttgttatgattttaggagatctggatttctattcatgatgcttggcgacaaaaataaatgaacaaaaagaacttatatcagccacagcaacataatttcttatgtcacttgtattctacctgtgtcctatatgcaattgttttaaaatctgttctttttctgatattgcctgagtgagttttgattctttttcgcttatctcttcttcatatttatgcaattgttttaaaatctgttctttttctgatattgcctgagtgagttttgattctttttcgcttatctcttcttcatatttctgtatgtcatttatttttttttcaatatcatctggatatttttcttgtctcacaacatcgttgtgatttatttttgaaagtttaattacctcttccttttctttttttagctcattaatcctgttcaataataaaaattgtcttttcttaaatatagatttagtcaattcaatatctgcatccttcttttttgactcttgcaccaaatgagatacaatattgaagatagaatttctctcttcgactacctcccataatgcagcctcagccgaaacgttatctttcgatgtttctatataaggtaggtttgcataggcttgtaactcattataaagcttcagaacctcggttctttcttttattaattcagatactaagtactcactaacctttgtatcattaaatgtaatttcagtctcatttgcacttaaagaaaataaagttgtatatttttcaagcagggcaatttcatttgattttgtataatcattattctcaaccacatcaaacaatattgaatttttgtaatgcgcagacattagattatctatttttataatattactcaatggctttataatatttttcttattgctttgaaacgcctcaaaattaatcaacacacatcgttctttattctccaaaaaaaaatcaagcaatcttttattatatgcaatccagttatctacactattatttatatttaaagagagaggggcattatttactgaacgcattaaattatatttagggtgatcatatatcatgatgaattttatgcttttatctatatttttccaaaaatcaagaaaaaatattatagatggatctgcccacccccaaagtttgttatttagattgttcatcattagttcaagaaccatgctatcccacatggttgagacttgaacagctgagaattctctctcatctactacatcattaacttctggtgtttgataaaattgacataatgaagcggtgatatattctggggaaattttattacttgtagaataatttggtgagttcatgccaatttctttcaaaaaatgttcaactatctgatactttgagccaggatgtccgactagcactaatttattcatcatatttcctctttattatctacaagattactttattttaaacactgtcgtttatcgtaatggtgatattgcagacatatatttcaaatctgtaatgtaatttaggtggcgttatgtgataatactaaatgaaactatctatatctcaatagcacatctgatttatttggtatagccattcatcaataaacaatatcaatataactcagagcacctcctaataattgacatattgcgttaccaccttcttttagacaaaaatcttaattataaactctaccaaactaacgctgatatttttcaaaatcataaaacaaatggtttaaataagtatataacaaaatatcaacgtacaactatttaaaacaagtatttatactataaacttcagaaaccaacacaaaatacaggaatgtgaataaaaaagtaagtttttacccttccacattatacactaattcgaggttaagttttgaatatcctgcgattgcttgtgtttcttttatgatgtctaaaggccatttttttgtaaatgtgttccaaagtccttccattgaacctgatgagacctctcttagccagtttttttctctgggaacacatatcataccaatttcattctctaacatatagcgagaaaatctaacatcgacgaatcgttgagaaccatccatatattttaaagatggtaattgatctgccttaagaaaaacagtccctgtacctaattgatttacaactctcggtcgcaatagcccttgagtaaatgaaaatacttttcttttagactgatctccatcaaatgcatctatgtatatacagccatgaatcccaacaatgcaattgaatattgcaaaggaattataaaaattgagcattttttctacataatcgggagggtaaataatatcatcatctgtaagtacgatcatatcatttttagcgcaaggaaatataaatttgcccacatccttataatctttatctggaataactggatttaattttgaaaaaccatctaattcctcaggaatttcttcaaactcattcaggcaaagattaattttatctacttgagcatgtaaactttgtatagaatgcaccaactctttttttcgaggtgggtatgatgacatatttgcaacaatcatggggtaatattttaattaatattgcatgttaatgaaaactatcaacgtattgatagtcgtttatttataggaaatgcttaataaacagaacacattaagttgattagaatgactccgcacctcatggacgatatgtttaattaaaaataactactagggtgtacgtttgatatatttatcttcatctaaattattactcttaccatatcaaaccactctttgcataaacatttcctgtaactatctaaaaataaattggcagataattaattaaagaataacagcaacgtattacgagatcacgatcaaattcataattgcctagttcaaagtatactgtccatcctcctcatacactaaatacaatagagtttatataattatatagagtgtgattacaatctccggcaatgacactgttagtgcaacagtaatcaggcctccctcttagtattgcttacgctgaaagaataactggcagcctgccacaccatgttgtctggcaacgaggaagaccgccattttcggttcaaggctctgctgaaaaatagcgattttcctgtgtggcacgctgtctgcgtttctctgcttctaagacaccaattatctattctccaactactagtctaaaagactagtatcactactatcagttatttaaatgatattgattgcctagagattcagggagctagtctagttattcagagaacggtatcttaacaattttgttatgattttaggagatctggatttctattcatgatgcttggcgacaaaaataaatgaacaaaaagaacttatatcagccacagcaacataatttcttatgtcacttgtattctacctgtgtcattaagtttatcgtttcaatttcataagatacatatgctatttgtcatattaattttattattaacaccaacgaatgacaagcagaacatataaatacctgaactaagagttaattatttaatataattatcattcaatatctaaagcttgatacattttatactcatctataccactttgaacattctcataataaccaataatatagctatttttaaaaacaatcctcaaggagtcagggaganctcatctnggggcaagtttcnngcttagatgctttcagcnnttatctcttccgcanttagctaccnggcantgccattggcatgacaaccngaacaccagngntncgtccactccggtcctctcgtactaggagcagccccnctcanntctccancgcccanggcagatagggaccgaactgtctcacgacgttctaaacccagctcgcgtaccactttaaatggcgaacagccatacccttgggacctacttcagccccaggatgtgatgagccgacatcgaggtgccaaacaccgccgtcgatatgaactcttgggcggtatcagcctgttatccccggagtaccttttatccgttgagcgatggcccttccattcagaaccaccggatcactangacctgctttcgcacctgctcgngccgtcacnctcgcagtcaagctggcttatgccnttgcactaacctcctgatgtccgaccaggattagcnaaccttcgtgctcctccgttactctttaggaggagaccgccccagtcaaactacccaccanacactgtccgcaacccggatnacgggccnacgttagaacatcaaacattaaagggtggtatttcaaggnnggctccatgcagactggcgtccacacttcaaagcctcccacctatcctacacatcaaggctcaatgttcagtgtcaagctatagtaaaggttcacggggtctttccgtcttgccgcgggtacactgcatcttcacagcgagttcaatttcactgagtctcgggtggagacagcctggccatcattacgccattcgtgcaggtcggaacttacccgacaaggaatttcgctaccttaggaccgttatagttacggccgccgtttaccggggcttcgatcaagagcttcgcnttncngctaaccccatcaattaaccttccggcaccgggcaggcgtcacaccgtatacgtccactttcgtgtttgcacagtgctgtgtttttaataaacagttgcagccagctggtatcttcgactgatttcagctccacgagcaagtcgcttcacctacatatcagcgtgccttctcccgaagttacggcaccattttgcctagttccttcacccgagttctctcaagcgccttggtattctctacctgaccacctgtgtcggtttggggtacgatttgatgttacctgatgcttagaggcttttcctggaagcagggcatttgtcncttcagcaccgtagtgcctcgtcatcacgcctcagccttggttttccggatttgcctggaaaaccagcctacacgcttaaaccgggacaaccgtcgcccggccaacatagccttctccgtccccccttcgcagtaacaccaagtacaggaatattaacctgtttcccatcgactacgcctttcggcctcgccttaggggtcgactcaccctgcccngattaacgttggacaggaacccttggtcttccggcgngcgggcttttcacccgcnttatcgttacttatgtcagcattcgcacttctgatacctccagcaancctcacannccaccttcacaggcttacagaacgctcccctacccaacaacacatagtgtcgctgccgcagcttcggtgcatggtttagccccgttacatcttccgcgcaggccgactcgaccagtgagctattacgctttctttaaatgatggctgcttctaagccaacatcctggctgtctgngccttcccacatcgtttcccacttaaccatgactttgggaccttagctggcggtctgggttgtttccctcttcacgacggacgttagcacccgccgtgtgtctcccgtgataacattctccggtattcgcagtttgcatcgggttggtaagtcgggatgaccccctngccgaaacagtgctctacccccggagatgaattcacgaggcgctacctaaatagctttcggggagaaccagctatctcccggtttgattggcctttcacccccagccacaagtcatccgctaatttttcaacattagtcggttcggtcctccagttagtgttacccaaccttcaacctgcccatggctagatcaccgggtttcgggtctataccctgcaacttaacgcccagttaagactcggtttcccttcggctcccctattcggttaaccttgctacagaatataagtcgctgacccattatacaaaaggtacgcagtcaccccattaagaggctcccactgcttgtacgtacacggtttcaggttctttttcactcccctcgccggggttcttttcgcctttccctcacggtactggttcactatcggtcagtcaggagtatttagccttggaggatggtccccccatattcagacaggataccacgtgtcccgccctactcatcgagctcacaatatgtgcatttttgtgtacggggctgtcaccctgtatcgcacgcctttccagacgcttccactaacacacacactgattcaggctctgggctcctccccgttcgctcgccgctactgggggaatctcggttgatttcttttcctcggggtacttagatgtttcagttcccccggttcgcctcattaacctatggattcagttaatgatagtgtgtcgaaacacactgggtttccccattcggaaatcgccggttataacggttcatatcacctcaccgacgcttatcgcagattagcacgtccttcatcgcctctgactgccagggcatccaccgtgtacgcttagtcgcttaacctcacaacccgaagatgtttcttgcgattcatcatcgtgttgcgaaaatttgagagactcacgaacaactctcgttgttcagtgtttcaattttcagcttgatccagatttttaaagagcaaaanntcncannnancnnnngnagntnnnntntganntattnntnatttantcacnannnagnnngtggngcnntnngggatcgaaccncngaccncctgcgtgcaaagcaggcgntntcccagctgngctntagncnnannnnangtagttnanncnncttcnnatttgcggtgcaaatttggtaggcctgagtggacttgaaccaccgacctcacccttatcaggggtgcgctctaaccacctgagctacaagcctgtagangnnttnctnntcantttcatcagacaatctgtgtgagcactgcaaagtacgcttctttaaggtaaggaggtgatccaaccgcaggttcccctacggttaccttgttacgacttcaccccagtcatgaatcacaaagtggtaagcgccctcccgaaggttaagctacctacttcttttgcaacccactcccatggtgtgacgggcggtgtgtacaaggcccgggaacgtattcaccgtggcattctgatccacgattactagcgattccgacttcatggagtcgagttgcagactccaatccggactacgacncactttatgaggtccgcttgctctcgcgagntcgcttctctttgtatgcgccattgtagcacgtgtgtagccctggtcgtaagggccatgatgacttgacgtcatccccaccttcctccagtttatcactggcagtctcctttgagttcccggccggaccgctggcaacaaaggataagggttgcgctcgttgcgggacttaacccaacatttcacaacacgagctgacgacagccatgcagcacctgtctcacggttcccgaaggcacattctcatctctgaaaacttccgtggatgtcaagaccaggtaaggttcttcgcgttgcatcgaattaaaccacatgctccaccgcttgtgcgggcccccgtcaattcatttgagttttaaccttgcggccgtactccccaggcggtcgacttaacgcgttagctccggaagccacgcctcaagggcacaacctccaagtcgacatcgtttacggcgtggactaccagggtatctaatcctgtttgctccccacgctttcgcacctgagcgtcagtcttcgtccagggggccgccttcgccaccggtattcctccagatctctacgcatttcaccgctacacctggaattctacccccctctacgagactcnagcttgccagtatcagatgcagntcccaggttgagcccggggatttcacatctgacttaacaaaccgcctgcgtgcgctttacgcccagtaattccgattaacgcttgcaccctccgtattaccgcggctgctggcacggagttagccggtgcttcttctgcgggtaacgtcaatgagcaaaggtattaactttactcccttcctccccgctgaaagtactttacaacccgaaggccttcttcatacacgcggcatggctgcatcaggcttgcgcccattgtgcaatattccccactgctgcctcccgtaggagtctggaccgtgtctcagttccagtgtggctggtcatcctctcagaccagctanggatcgtcgcctaggtgagcctttaccccaccnactagctaatcccatctgggcacatccnatggcaagaggccngaaggtccccctctttggtcttgcgacgttatgcggtattagctaccgtttccagtagttatccccctccatcaggcagtttcccagacattactcacccgtccgccactcgncancaaancagcaagctgnttnctgttaccgttcgacttgcatgtgttaggcctgccgccagcgttcaatctgagccangatcaaactcttcaatttaaaagtttgatgctcanngaattaaacttcgtaatgaattacgtgttcactccngagacttggtattcatttttcgtcttgcgacgtcaagaatccgtatcttcgagtgcccacacagattgtctgataaattgttaaagagcagttgcgacgcggctttcagctcactgtcgcgaggtggcgtatattacgctttcctctntcagagtcaaccctgaatttcaggatttttctctttgttgttacgactatcttgtgactcccctattcggttaaccttgctacagaatataagtcgctgacccattatacaaaaggtacgcagtcaccccattaagaggctcccactgcttgtacgtacacggtttcaggttctttttcactcccctcgccggggttcttttcgcctttccctcacggtactggttcactatcggtcagtcaggagtatttagccttggaggatggtccccccatattcagacaggataccacgtgtcccgccctactcatcgagctcacaatatgtgcatttttgtgtacggggctgtcaccctgtatcgcacgcctttccagacgcttccactaacacacacactgattcaggctctgggctcctccccgttcgctcgccgctactgggggaatctcggttgatttcttttcctcggggtacttagatgtttcagttcccccggttcgcctcattaacctatggattcagttaatgatagtgtgtcgaaacacactgggtttccccattcggaaatcgccggttataacggttcatatcacctcaccgacgcttatcgcagattagcacgtccttcatcgcctctgactgccagggcatccaccgtgtacgcttagtcgcttaacctcacaacccgaagatgtttcttgcgattcatcatcgtgttgcgaaaatttgagagactcacgaacaactctcgttgttcagtgtttcaattttcagcttgatccagatttttaaagagcaaaacttcgcagtgaacctttgcaggtacactctgaagtattttttatttaatcactacagagatggtggagctatgcgggatcgaaccgcagacctcctgcgtgcaaagcaggcgctctcccagctgagctatagccccataacatgtagttaaaacctcttcaaatttgcggtgcaaatttggtaggcctgagtggacttgaaccaccgacctcacccttatcaggggtgcgctctaaccacctgagctacaagcctgtagaggttttactgctcattttcatcagacaatctgtgtgagcactgcaaagtacgcttctttaaggtaaggaggtgatccaaccgcaggttcccctacggttaccttgttacgacttcaccccagtcatgaatcacaaagtggtaagcgccctcccgaaggttaagctacctacttcttttgcaacccactcccatggtgtgacgggcggtgtgtacaaggcccgggaacgtattcaccgtggcattctgatccacgattactagcgattccgacttcatggagtcgagttgcagactccaatccggactacgacgcactttatgaggtccgcttgctctcgcgagntcgcttctctttgtatgcgccattgtagcacgtgtgtagccctggtcgtaagggccatgatgacttgacgtcatccccaccttcctccagtttatcactggcagtctcctttgagttcccggccggaccgctggcaacaaaggataagggttgcgctcgttgcgggacttaacccaacatttcacaacacgagctgacgacagccatgcagcacctgtctcacggttcccgaaggcacattctcatctctgaaaacttccgtggatgtcaagaccaggtaaggttcttcgcgttgcatcgaattaaaccacatgctccaccgcttgtgcgggcccccgtcaattcatttgagttttaaccttgcggccgtactccccaggcggtcgacttaacgcgttagctccggaagccacgcctcaagggcacaacctccaagtcgacatcgtttacggcgtggactaccagggtatctaatcctgtttgctccccacgctttcgcacctgagcgtcagtcttcgtccagggggccgccttcgccaccggtattcctccagatctctacgcatttcaccgctacacctggaattctacccccctctacgagactcaagcttgccagtatcagatgcagttcccaggttgagcccggggatttcacatctgacttaacaaaccgcctgcgtgcgctttacgcccagtaattccgattaacgcttgcaccctccgtattaccgcggctgctggcacggagttagccggtgcttcttctgcgggtaacgtcaatgagcaaaggtattaactttactcccttcctccccgctgaaagtactttacaacccgaaggccttcttcatacacgcggcatggctgcatcaggcttgcgcccattgtgcaatattccccactgctgcctcccgtaggagtctggaccgtgtctcagttccagtgtggctggtcatcctctcagaccagctagggatcgtcgcctaggtgagcctttaccccacctactagctaatcccatctgggcacatccgatggcaagaggcccgaaggtccccctctttggtcttgcgacgttatgcggtattagctaccgtttccagtagttatccccctccatcaggcagtttcccagacattactcacccgtccgccactcgtcagcaaatcagcaagctgattcctgttaccgttcgacttgcatgtgttaggcctgccgccagcgttcaatctgagccatgatcaaactcttcaatttaaaagtttgatgctcaaagaattaaacttcgtaatgaattacgtgttcactcctgagacttggtattcatttttcgtcttgcgacgtcaagaatccgtatcttcgagtgcccacacagattgtctgataaattgttaaagagcagttgcgacgcggctttcagctcactgtcgcgaggtggcgtatattacgctttcctctttcagagtcaaccctgaatttcaggatttttctcttcaaccgaaccggctgtttgtgtgaagtgattcacatccgccgtgtcgatggaggcgcattatagggagtcgtttcaggaagacaagcggaaaaatgcatttttatttcaaccgctcatcttttaatcatcacgccggtttttgctgcttttttatcgcttgcggcaggtctgccagactatttaacacccaatccgccgcgttttctgcttcaggcgtaataggtttacccgtacgcaccagcactttcgttcccacgctcgccgcagccgctgcctgcatatcttctaatttatcgcccaccatataagaagcggccatatcaatatgcaaataatcgcgtgctgacaaaaacatccccggatgtggtttgcggcagtcgcagacctggcgaaactcttcaacactaccctgcggatgatgcgggcaataatagatgccatccagatcgacatcgcggtccgcaagcgaccagtccatccactcggtcagcgtttcaaactgtgcttcagtaaatttaccgcgagcaatgccagactggttggttactaccaccagcgcaaagcccattttttttagctcgcgcatggcgtcaataacaccgtcgataaattcaaagttgtcgatctcatggacatagccgtgatcaacattaatggtgccatcacggtcaagaaaaattgcgggtacgctcttcgccaccttttatagctccttaataaggcatgtgacgctagtatcgcatgtttcgacctgcaagaaagtgctcttcgcataaacctgattgatttagacgtctggatgccttaacatccatttcattgacggcgttgcccgttccaggcattcgaaatgccacgactaacttaatgacgataataaataatcaatgataaaactttcgaatatcaccaaagtgttccaccagggcacccgcaccatccaggcgttgaacaacgtcagcctgcatgtgccagctggacaaatttatggcgttatcggtgcctcaggcgcgggtaagagtacgcttatacgttgtgtaaacctgctggagcgcccaaccgagggtagcgtgctggtcgatggccaggaactgaccacgctgtcagaatccgagttgaccaaagctcgtcgccagattggtatgattttccagcattttaacctgctctcttcgcgtactgtttttggcaacgtggctctgccgctggagctggacaacacaccgaaagacgagatcaaacgtcgcgtgacggaattgctgtcattggttggtcttggcgataagcatgatagctacccgtcgaatctttccggtgggcagaaacaacgtgtggcgattgcccgtgcattagccagcaatcccaaagtattgctgtgtgatgaagccaccagcgcgctggacccggcaacgacacgttctattctcgaactgctgaaagacatcaaccgccgtctgggtttgacgattctgttgatcactcacgaaatggacgttgtgaagcgcatttgtgattgcgtggcgnnnngggtcttcccctgttgtggtgggtggtacataattgagtgattttcaaacaccacacagtacctttatggtgtctctttttacatgagagggaattcttatgagtgtgccgcaaacaaaagctgaactgcttttagctattgataaaaattttagtaaattaattagttacctcaacacaatcccaccagaaattacttcagataaatcaatggacggacacgccaaaggaacggagatgagtgttcgtgatctcgtttcgtatctgcttggatggaatgctcttgttgtaaagtggatcgcttctgatgctaaaggtctgcctgtcgattttccggaaactggctataaatggaatcagcttggccttcttgctcaaaaattttactcagattacagtgagttaagttatgagttgttagtagctgaacttcagactgtaaaaaatgagattgtgaaccttattaatgatcgtaccgatgatattttgtatggaagaccatggtacacaaaatggacgatggggagaatgatctcatttaacacatcttcgccttacgccaacgctaatggaagattaagaaagtgggcaaaaaataataatatcagtttaaagtaagcttcagaatgaaattatatggacgaaaaatccctctatgcccatatccttaacctgactgcaccatggcaggttaaatcccttaccctcgatgaaaatgcaggttccgttactgttacagtcggaattgctgaaaatactcagttaacctgtccgacctgcaggaaatcctgttctgttcacgatcaccgacatcgtaaatggcgccaccttgatacctgccagttcatgacattagtagaagccgatgttccccgcgttatgtgcccggagcatggctgccagactctgcctgtaccgtgggcaggttccggcagtcggtacactctgctgttcgaatcgttcgtgctctcatggcttaaaatcagcaccgttgatgcggtcagaaaacaacttaaacttagctggaatgccgttgacggcatcatgacccgcgcggttaagcgaggcctgtcgcggattaaaaagcctttatcagtgcgtcatatgaatgtagacgaagtcgcctttaaaaaagggcataggtatataaccgtggtatctgatcgcgacgggcgggcactggcattaaccgatgatcgtggcacagagagtcttgccagctatctccgttcgcttactgacagtcagttgttggccatcaaaacactgtcgatggacatgaatgcgggctatataagagcagcgcgtatccatttacccaatgcggtcgagaaaatcgcnnnnnnnnnnnnnnnnnnnnnnnnnnnnngagttaagttatgagttgttagtagctgaacttcagactgtaaaaaatgagattgtgaaccttattaatgatcgtaccgatgatattttgtatggaagaccatggtacacaaaatggacgatggggagaatgatctcatttaacacatcttcgccttacgccaacgctaatggaagattaagaaagtgggcaaaaaataataatatcagtttaaagtaagcttcagaatgaaattatatggacgaaaaatccctctatgcccatatccttaacctgactgcaccatggcaggttaaatcccttaccctcgatgaaaatgcaggttccgttactgttacagtcggaattgctgaaaatactcagttaacctgtccgacctgcaggaaatcctgttctgttcacgatcaccgacatcgtaaatggcgccaccttgatacctgccagttcatgacattagtagaagccgatgttccccgcgttatgtgcccggagcatggctgccagactctgcctgtaccgtgggcaggttccggcagtcggtacactctgctgttcgaatcgttcgtgctctcatggcttaaaatcagcaccgttgatgcggtcagaaaacaacttaaacttagctggaatgccgttgacggcatcatgacccgcgcggttaagcgaggcctgtcgcggattaaaaagcctttatcagtgcgtcatatgaatgtagacgaagtcgcctttaaaaaagggcataggtatataaccgtggtatctgatcgcgacgggcgggcactggcattaaccgatgatcgtggcacagagagtcttgccagctatctccgttcgcttactgacagtcagttgttggccatcaaaacactgtcgatggacatgaatgcgggctatataagagcagcgcgtatccatttacccaatgcggtcgagaaaatcgccttcgatcgcttccatgtggcgaagcaactgggcgaagtggttgataaaacccgccagaatgaacatccgcacctccctgttgaaagtcgtcgtcaggccaaaggtacccgcttcctgtggcagtacagcgacaaatggatgactgagtcccggcaggaaaagctgatgtggttgcgggaacagatgcaacagacaagccagtgctggacactgaaagagctggcaaaaaatatctgggatcgcccctggagcacagaacgcaggaatgactggttgcagtggatatcgctggcgtctgaatgtgatgtgccgatgatgaaaaacgcagcgaaaaccattaaaaaacggttatacggaatactgaatgcaatgcgtcatcgcgtctcgaatggaaatgcggaggcgctgaacagcaagatcagactgctgaggataaaggccaggggataccgaaaccgggaacgctttaaactgggagttatgttccactatgggaaactgaatatggcgtactgagtcttcccaccatgatcggggaagacccnnnnnnnnnnnnnnnnnnnnnnnnnnnnnnnnnnnnnnnnnnnnnnnnnnnnnnnnnnnnnnnnnnnnnnnnnnnnnnnnnnnnnnnnnnnnnnnnnnnnnnnnnnnnnnnnnnnnnnnnnnnnnnnnnnnnnnnnnnnnnnnnnnnnnnnnnnnnnnnnnnnnnnnnnnnnnnnnnnnnnnnnnnnnnnnnnnnnnnnnnnnnnnnnnnnnnnnnnnnnnnnnnnnnnnnnnnnnnnnnnnnnnnnnnnnnnnnnnnnnnnnnnnnnnnnnnnnnnnnnnnnnnnnnnnnnnnnnnnnnnnnnnnnnnnnnnnnnnnnnnnnnnnnnnnnnnnnnnnnnnnnnnnnnnnnnnnnnnnnnnnnnnnnnnnnnnnnnnnnnnnnnnnnnnnnnnnnnnnnnnnnnnnnnnnnnnnnnnnnnnnnnnnnnnnnnnnnnnnnnnnnnnnnnnnnnnnnnnnnnnnnnnnnnnnnnnnnnnnnnnnnnnnnnnnnnnnnnnnnnnnnnnnnnnnnnnnnnnnnnnnnnnnnnnnnnnnnnnnnnnnnnnnnnnnnnnnnnnnnnnnnnnnnnnnnnnnnnnnnnnnnnnnnnnnnnnnnnnnnnnnnnnnnnnnnnnnnnnnnnnnnnnnnnnnnnnnnnnnnnnnnnnnnnnnnnnnnnnnnnnnnnnnnnnnnnnnnnnnnnnnnnnnnnnnnnnnnnnnnnnnnnnnnnnnnnnnnnnnnnnnnnnnnnnnnnnnnnnnnnnnnnnnnnnnnnnnnnnnnnnnnnnnnnnnnnnnnnnnnnnnnnnnnnnnnnnnnnnnnnnnnnnnnnnnnnnnnnnnnnnnnnnnnnnnnnnnnnnnnnnnnnnnnnnnnnnnnnnnnnnnnnnnnnnnnnnnnnnnnnnnnnnnnnnnnnnnnnnnnnnnnnnnnnnnnnnnnnnnnnnnnnnnnnnnnnnnnnnnnnnnnnnnnnnnnnnnnnnnnnnnnnnnnnnnnnnnnnnnnnnnnnnnnnnnnnnnnnnnnnnnnnnnnnnnnnnnnnnnnnnnnnnnnnnnnnnnnnnnnnnnnnnnnnnnnnnnnnnnnnnnnnnnnnnnnnnnnnnnnnnnnnnnnnnnnnnnnnnnnnnnnnnnnnnnnnnnnnnnnnnnnnnnnnnnnnnnnnnnnnnnnnnnnnnnnnnnnnnnnnnnnnnnnnnnnnnnnnnnnnnnnnnnnnnnnnnnnnnnnnnnnnnnnnnnnnnnnnnnnnnnnnnnnnnnnnnnnnnnnnnnnnnnnnnnnnnnnnnnnnnnnnnnnnnnnnnnnnnnnnnnnnnnnnnnnnnnnnnnnnnnnnnnnnnnnnnnnnnnnnnnnnnnnnnnnnnnnnnnnnnnnnnnnnnnnnnnnnnnnnnnnnnnnnnnnnnnnnnnnnnnnnnnnnnnnnnnnnnnnnnnnnnnnnnnnnnnnnnnnnnnnnnnnnnnnnnnnnnnnnnnnnnnnnnnnnnnnnnnnnnnnnnnnnnnnnnnnnnnnnnnnnnnnnnnnnnnnnnnnnnnnnnnnnnnnnnnnnnnnnnnnnnnnnnnnnnnnnnnnnnnnnnnnnnnnnnnnnnnnnnnnnnnnnnnnnnnnnnnnnnnnnnnnnnnnnnnnnnnnnnnnnnnnnnnnnnnnnnnnnnnnnnnnnnnnnnnnnnnnnnnnnnnnnnnnnnnnnnnnnnnnnnnnnnnnnnnnnnnnnnnnnnnnnnnnnnnnnnnnnnnnnnnnnnnnnnnnnnnnnnnnnnnnnnnnnnnnnnnnnnnnnnnnnnnnnnnnnnnnnnnnnnnnnnnnnnnnnnnnnnnnnnnnnnnnnnnnnnnnnnnnnnnnnnnnnnnnnnnnnnnnnnnnnnnnnnnnnnnnnnnnnnnnnnnnnnnnnnnnnnnnnnnnnnnnnnnnnnnnnnnnnnnnnnnnnnnnnnnnnnnnnnnnnnnnnnnnnnnnnnnnnnnnnnnnnnnnnnnnnnnnnnnnnnnnnnnnnnnnnnnnnnnnnnnnnnnnnnnnnnnnnnnnnnnnnnnnnnnnnnnnnnnnnnnnnnnnnnnnnnnnnnnnnnnnnnnnnnnnnnnnnnnnnnnnnnnnnnnnnnnnnnnnnnnnnnnnnnnnnnnnnnnnnnnnnnnnnnnnnnnnnnnnnnnnnnnnnnnnnnnnnnnnnnnnnnnnnnnnnnnnnnnnnnnnnnnnnnnnnnnnnnnnnnnnnnnnnnnnnnnnnnnnnnnnnnnnnnnnnnnnnnnnnnnnnnnnnnnnnnnnnnnnnnnnnnnnnnnnnnnnnnnnnnnnnnnnnnnnnnnnnnnnnnnnnnnnnnnnnnnnnnnnnnnnnnnnnnnnnnnnnnnnnnnnnnnnnnnnnnnnnnnnnnnnnnnnnnnnnnnnnnnnnnnnnnnnnnnnnnnnnnnnnnnnnnnnnnnnnnnnnnnnnnnnnnnnnnnnnnnnnnnnnnnnnnnnnnnnnnnnnnnnnnnnnnnnnnnnnnnnnnnnnnnnnnnnnnnnnnnnnnnnnnnnnnnnnnnnnnnnnnnnnnnnnnnnnnnnnnnnnnnnnnnnnnnnnnnnnnnnnnnnnnnnnnnnnnnnnnnnnnnnnnnnnnnnnnnnnnnnnnnnnnnnnnnnnnnnnnnnnnnnnnnnnnnnnnnnnnnnnnnnnnnnnnnnnnnnnnnnnnnnnnnnnnnnnnnnnnnnnnnnnnnnnnnnnnnnnnnnnnnnnnnnnnnnnnnnnnnnnnnnnnnnnnnnnnnnnnnnnnnnnnnnnnnnnnnnnnnnnnnnnnnnnnnnnnnnnnnnnnnnnnnnnnnnnnnnnnnnnnnnnnnnnnnnnnnnnnnnnnnnnnnnnnnnnnnnnnnnnnnnnnnnnnnnnnnnnnnnnnnnnnnnnnnnnnnnnnnnnnnnnnnnnnnnnnnnnnnnnnnnnnnnnnnnnnnnnnnnnnnnnnnnnnnnnnnnnnnnnnnnnnnnnnnnnnnnnnnnnnnnnnnnnnnnnnnnnnnnnnnnnnnnnnnnnnnnnnnnnnnnnnnnnnnnnnnnnnnnnnnnnnnnnnnnnnnnnnnnnnnnnnnnnnnnnnnnnnnnnnnnnnnnnnnnnnnnnnnnnnnnnnnnnnnnnnnnnnnnnnnnnnnnnnnnnnnnnnnnnnnnnnnnnnnnnnnnnnnnnnnnnnnnnnnnnnnnnnnnnnnnnnnnnnnnnnnnnnnnnnnnnnnnnnnnnnnnnnnnnnnnnnnnnnnnnnnnnnnnnnnnnnnnnnnnnnnnnnnnnnnnnnnnnnnnnnnnnnnnnnnnnnnnnnnnnnnnnnnnnnnnnnnnnnnnnnnnnnnnnnnnnnnnnnnnnnnnnnnnnnnnnnnnnnnnnnnnnnnnnnnnnnnnnnnnnnnnnnnnnnnnnnnnnnnnnnnnnnnnnnnnnnnnnnnnnnnnnnnnnnnnnnnnnnnnnnnnnnnnnnnnnnnnnnnnnnnnnnnnnnnnnnnnnnnnnnnnnnnnnnnnnnnnnnnnnnnnnnnnnnnnnnnnnnnnnnnnnnnnnnnnnnnnnnnnnnnnnnnnnnnnnnnnnnnnnnnnnnnnnnnnnnnnnnnnnnnnnnnnnnnnnnnnnnnnnnnnnnnnnnnnnnnnnnnnnnnnnnnnnnnnnnnnnnnnnnnnnnnnnnnnnnnnnnnnnnnnnnnnnnnnnnnnnnnnnnnnnnnnnnnnnnnnnnnnnnnnnnnnnnnnnnnnnnnnnnnnnnnnnnnnnnnnnnnnnnnnnnnnnnnnnnnnnnnnnnnnnnnnnnnnnnnnnnnnnnnnnnnnnnnnnnnnnnnnnnnnnnnnnnnnnnnnnnnnnnnnnnnnnnnnnnnnnnnnnnnnnnnnnnnnnnnnnnnnnnnnnnnnnnnnnnnnnnnnnnnnnnnnnnnnnnnnnnnnnnnnnnnnnnnnnnnnnnnnnnnnnnnnnnnnnnnnnnnnnnnnnnnnnnnnnnnnnnnnnnnnnnnnnnnnnnnnnnnnnnnnnnnnnnnnnnnnnnnnnnnnnnnnnnnnnnnnnnnnnnnnnnnnnnnnnnnnnnnnnnnnnnnnnnnnnnnnnnnnnnnnnnnnnnnnnnnnnnnnnnnnnnnnnnnnnnnnnnnnnnnnnnnnnnnnnnnnnnnnnnnnnnnnnnnnnnnnnnnnnnnnnnnnnnnnnnnnnnnnnnnnnnnnnnnnnnnnnnnnnnnnnnnnnnnnnnnnnnnnnnnnnnnnnnnnnnnnnnnnnnnnnnnnnnnnnnnnnnnnnnnnnnnnnnnnnnnnnnnnnnnnnnnnnnnnnnnnnnnnnnnnnnnnnnnnnnnnnnnnnnnnnnnnnnnnnnnnnnnnnnnnnnnnnnnnnnnnnnnnnnnnnnnnnnnnnnnnnnnnnnnnnnnnnnnnnnnnnnnnnnnnnnnnnnnnnnnnnnnnnnnnnnnnnnnnnnnnnnnnnnnnnnnnnnnnnnnnnnnnnnnnnnnnnnnnnnnnnnnnnnnnnnnnnnnnnnnnnnnnnnnnnnnnnnnnnnnnnnnnnnnnnnnnnnnnnnnnnnnnnnnnnnnnnnnnnnnnnnnnnnnnnnnnnnnnnnnnnnnnnnnnnnnnnnnnnnnnnnnnnnnnnnnnnnnnnnnnnnnnnnnnnnnnnnnnnnnnnnnnnnnnnnnnnnnnnnnnnnnnnnnnnnnnnnnnnnnnnnnnnnnnnnnnnnnnnnnnnnnnnnnnnnnnnnnnnnnnnnnnnnnnnnnnnnnnnnnnnnnnnnnnnnnnnnnnnnnnnnnnnnnnnnnnnnnnnnnnnnnnnnnnnnnnnnnnnnnnnnnnnnnnnnnnnnnnnnnnnnnnnnnnnnnnnnnnnnnnnnnnnnnnnnnnnnnnnnnnnnnnnnnnnnnnnnnnnnnnnnnnnnnnnnnnnnnnnnnnnnnnnnnnnnnnnnnnnnnnnnnnnnnnnnnnnnnnnnnnnnnnnnnnnnnnnnnnnnnnnnnnnnnnnnnnnnnnnnnnnnnnnnnnnnnnnnnnnnnnnnnnnnnnnnnnnnnnnnnnnnnnnnnnnnnnnnnnnnnnnnnnnnnnnnnnnnnnnnnnnnnnnnnnnnnnnnnnnnnnnnnnnnnnnnnnnnnnnnnnnnnnnnnnnnnnnnnnnnnnnnnnnnnnnnnnnnnnnnnnnnnnnnnnnnnnnnnnnnnnnnnnnnnnnnnnnnnnnnnnnnnnnnnnnnnnnnnnnnnnnnnnnnnnnnnnnnnnnnnnnnnnnnnnnnnnnnnnnnnnnnnnnnnnnnnnnnnnnnnnnnnnnnnnnnnnnnnnnnnnnnnnnnnnnnnnnnnnnnnnnnnnnnnnnnnnnnnnnnnnnnnnnnnnnnnnnnnnnnnnnnnnnnnnnnnnnnnnnnnnnnnnnnnnnnnnnnnnnnnnnnnnnnnnnnnnnnnnnnnnnnnnnnnnnnnnnnnnnnnnnnnnnnnnnnnnnnnnnnnnnnnnnnnnnnnnnnnnnnnnnnnnnnnnnnnnnnnnnnnnnnnnnnnnnnnnnnnnnnnnnnnnnnnnnnnnnnnnnnnnnnnnnnnnnnnnnnnnnnnnnnnnnnnnnnnnnnnnnnnnnnnnnnnnnnnnnnnnnnnnnnnnnnnnnnnnnnnnnnnnnnnnnnnnnnnnnnnnnnnnnnnnnnnnnnnnnnnnnnnnnnnnnnnnnnnnnnnnnnnnnnnnnnnnnnnnnnnnnnnnnnnnnnnnnnnnnnnnnnnnnnnnnnnnnnnnnnnnnnnnnnnnnnnnnnnnnnnnnnnnnnnnnnnnnnnnnnnnnnnnnnnnnnnnnnnnnnnnnnnnnnnnnnnnnnnnnnnnnnnnnnnnnnnnnnnnnnnnnnnnnnnnnnnnnnnnnnnnnnnnnnnnnnnnnnnnnnnnnnnnnnnnnnnnnnnnnnnnnnnnnnnnnnnnnnnnnnnnnnnnnnnnnnnnnnnnnnnnnnnnnnnnnnnnnnnnnnnnnnnnnnnnnnnnnnnnnnnnnnnnnnnnnnnnnnnnnnnnnnnnnnnnnnnnnnnnnnnnnnnnnnnnnnnnnnnnnnnnnnnnnnnnnnnnnnnnnnnnnnnnnnnnnnnnnnnnnnnnnnnnnnnnnnnnnnnnnnnnnnnnnnnnnnnnnnnnnnnnnnnnnnnnnnnnnnnnnnnnnnnnnnnnnnnnnnnnnnnnnnnnnnnnnnnnnnnnnnnnnnnnnnnnnnnnnnnnnnnnnnnnnnnnnnnnnnnnnnnnnnnnnnnnnnnnnnnnnnnnnnnnnnnnnnnnnnnnnnnnnnnnnnnnnnnnnnnnnnnnnnnnnnnnnnnnnnnnnnnnnnnnnnnnnnnnnnnnnnnnnnnnnnnnnnnnnnnnnnnnnnnnnnnnnnnnnnnnnnnnnnnnnnnnnnnnnnnnnnnnnnnnnnnnnnnnnnnnnnnnnnnnnnnnnnnnnnnnnnnnnnnnnnnnnnnnnnnnnnnnnnnnnnnnnnnnnnnnnnnnnnnnnnnnnnnnnnnnnnnnnnnnnnnnnnnnnnnnnnnnnnnnnnnnnnnnnnnnnnnnnnnnnnnnnnnnnnnnnnnnnnnnnnnnnnnnnnnnnnnnnnnnnnnnnnnnnnnnnnnnnnnnnnnnnnnnnnnnnnnnnnnnnnnnnnnnnnnnnnnnnnnnnnnnnnnnnnnnnnnnnnnnnnnnnnnnnnnnnnnnnnnnnnnnnnnnnnnnnnnnnnnnnnnnnnnnnnnnnnnnnnnnnnnnnnnnnnnnnnnnnnnnnnnnnnnnnnnnnnnnnnnnnnnnnnnnnnnnnnnnnnnnnnnnnnnnnnnnnnnnnnnnnnnnnnnnnnnnnnnnnnnnnnnnnnnnnnnnnnnnnnnnnnnnnnnnnnnnnnnnnnnnnnnnnnnnnnnncaactctcgttgttcagtgtttcaattttcagcttgatccagatttttaaagagcaaaacttcgcagtgaacctttgcaggtacactctgaagtattttttatttaatcactacagagatggtggagctatgcgggatcgaaccgcagacctcctgcgtgcaaagcaggcgctctcccagctgagctatagccccataacatgtagttaaaacctcttcaaatttgcggtgcaaatttggtaggcctgagtggacttgaaccaccgacctcacccttatcaggggtgcgctctaaccacctgagctacaagcctgtagaggttttactgctcattttcatcagacaatctgtgtgagcactgcaaagtacgcttctttaaggtaaggaggtgatccaaccgcaggttcccctacggttaccttgttacgacttcaccccagtcatgaatcacaaagtggtaagcgccctcccgaaggttaagctacctacttcttttgcaacccactcccatggtgtgacgggcggtgtgtacaaggcccgggaacgtattcaccgtggcattctgatccacgattactagcgattccgacttcatggagtcgagttgcagactccaatccggactacgacgcactttatgaggtccgcttgctctcgcgagntcgcttctctttgtatgcgccattgtagcacgtgtgtagccctggtcgtaagggccatgatgacttgacgtcatccccaccttcctccagtttatcactggcagtctcctttgagttcccggccggaccgctggcaacaaaggataagggttgcgctcgttgcgggacttaacccaacatttcacaacacgagctgacgacagccatgcagcacctgtctcacggttcccgaaggcacattctcatctctgaaaacttccgtggatgtcaagaccaggtaaggttcttcgcgttgcatcgaattaaaccacatgctccaccgcttgtgcgggcccccgtcaattcatttgagttttaaccttgcggccgtactccccaggcggtcgacttaacgcgttagctccggaagccacgcctcaagggcacaacctccaagtcgacatcgtttacggcgtggactaccagggtatctaatcctgtttgctccccacgctttcgcacctgagcgtcagtcttcgtccagggggccgccttcgccaccggtattcctccagatctctacgcatttcaccgctacacctggaattctacccccctctacgagactcaagcttgccagtatcagatgcagttcccaggttgagcccggggatttcacatctgacttaacaaaccgcctgcgtgcgctttacgcccagtaattccgattaacgcttgcaccctccgtattaccgcggctgctggcacggagttagccggtgcttcttctgcgggtaacgtcaatgagcaaaggtattaactttactcccttcctccccgctgaaagtactttacaacccgaaggccttcttcatacacgcggcatggctgcatcaggcttgcgcccattgtgcaatattccccactgctgcctcccgtaggagtctggaccgtgtctcagttccagtgtggctggtcatcctnnnnnnnnnnnnnnnnnnnnnnnnnnnnnnnnnnnnnnnnnnnnnnnnnnnnnnnnnnnnnnnnnnnnnnnnnnnnnnnnnnnnnnnnnnnnnnnnnnnnnnnnnnnnnnnnnnnnnnnnnnnnnnnnnnnnnnnnnnnnnnnnnnnnnnnnnnnnnnnnnnnnnnnnnnnnnnnnnnnnnnnnnnnnnnnnnnnnnnnnnnnnnnnnnnnnnnnnnnnnnnnnnnnnnnnnnnnnnnnnnnnnnnnnnnnnnnnnnnnnnnnnnnnnnnnnnnnnnnnnnnnnnnnnnnnnnnnnnnnnnnnnnnnnnnnnnnnnnnnnnnnnnnnnnnnnnnnnnnnnnnnnnnnnnnnnnnnnnnnnnnnnnnnnnnnnnnnnnnnnnnnnnnnnnnnnnnnnnnnnnnnnnnnnnnnnnnnnnnnnnnnnnnnnnnnnnnnnnnnnnnnnnnnnnnnnnnnnnnnnnnnnnnnnnnnnnnnnnnnnnnnnnnnnnnnnnnnnnnnnnnnnnnnnnnnnnnnnnnnnnnnnnnnnnnnnnnnnnnnnnnnnnnnnnnnnnnnnnnnnnnnnnnnnnnnnnnnnnnnnnnnnnnnnnnnnnnnnnnnnnnnnnnnnnnnnnnnnnnnnnnnnnnnnnnnnnnnnnnnnnnnnnnnnnnnnnnnnnnnnnnnnnnnnnnnnnnnnnnnnnnnnnnnnnnnnnnnnnnnnnnnnnnnnnnnnnnnnnnnnnnnnnnnnnnnnnnnnnnnnnnnnnnnnnnnnnnnnnnnnnnnnnnnnnnnnnnnnnnnnnnnnnnnnnnnnnnnnnnnnnnnnnnnnnnnnnnnnnnnnnnnnnnnnnnnnnnnnnnnnnnnnnnnnnnnnnnnnnnnnnnnnnnnnnnnnnnnnnnnnnnnnnnnnnnnnnnnnnnnnnnnnnnnnnnnnnnnnnnnnnnnnnnnnnnnnnnnnnnnnnnnnnnnnnnnnnnnnnnnnnnnnnnnnnnnnnnnnnnnnnnnnnnnnnnnnnnnnnnnnnnnnnnnnnnnnnnnnnnnnnnnnnnnnnnnnnnnnnnnnnnnnnnnnnnnnnnnnnnnnnnnnnnnnnnnnnnnnnnnnnnnnnnnnnnnnnnnnnnnnnnnnnnnnnnnnnnnnnnnnnnnnnnnnnnnnnnnnnnnnnnnnnnnnnnnnnnacccgacnnnnnnnngnannncnnnnnnnntgaannnnnnncagnnnngnntnnnnnnnnnnnnngnnnnnngnnnnnnntnnnnnnnnnnnnnngannntcntcnnnnnnnnnnnannnnnnnnnncntgcagatggnnnnnnncnngnnnnnnnncggcctgctnnnncnncngngngnngntnannnntncnngntcngncnngcgctgtttnnnnnnnannnngnnnnnnnnnnanntnnnnnncnnnnncnnnnnnnnnannnnnnnnnnnnnnnnnnnnnnnnnnnnnnnnnnnnnnnnnnnnnnnnnnnnnnnnnnnnnnnnnnnnnnnnnnnnnnnnnnnnnnnnnnnnnnnnnnnnnnnnnnnnnnnnnnnnnnnnnnnnnnnnnnnnnnnnnnnnnnnnnnnnnnnnnnnnnnnnnnnnnnnnnnnnnnnnnnnnnnnnnnnnnnnnnnnnnnnnnnnnnnnnnnnnnnnnnnnnnnnnnnnnnnnnnnnnnnnnnnnnnnnnnnnnnnnnnnnnnnnnnnnnnnnnnnnnnnnnnnnnnnnnnnnnnnnnnnnnnnnnnnnnnnnnnnnnnnnnnnnnnnnnnnnnnnnnnnnnnnnnnnnnnnnnnnnnnnnnnnnnnnnnnnnnnnnnnnnnnnnnnnnnnnnnnnnnnnnnnnnnnnnnnnnnnnnnnnnnnnnnnnnnnnnnnnnnnnnnnnnnnnnnnnnnnnnnnnnnnnnnnnnnnnnnnnnnnnnnnnnnnnnnnnnnnnnnnnnnnnnnnnnnnnnnnnnnnnnnnnnnnnnnnnnnnnnnnnnnnnnnnnnnnnnnnnnnnnnnnnnnnnnnnnnnnnnnnnnnnnnnnnnnnnnnnnnnnnnnnnnnnnnnnnnnnnnnnnnnnnnnnnnnnnnnnnnnnnnnnnnnnnnnnnnnnnnnnnnnnnnnnnnnnnnnnnnnnnnnnnnnnnnnnnnnnnnnnnnnnnnnnnnnnnnnnnnnnnnnnnnnnnnnnnnnnnnnnnnnnnnnnnnnnnnnnnnnnnnnnnnnnnnnnnnnnnnnnnnnnnnnnnnnnnnnnnnnnnnnnnnnnnnnnnnnnnnnnnnnnnnnnnnnnnnnnnnnnnnnnnnnnnnnnnnnnnnnnnnnnnnnnnnnnnnnnnnnnnnnnnnnnnnnnnnnnnnnnnnnnnnnnnnnnnnnnnnnnnnnnnnnnnnnnnnnnnnnnnnnnnnnnnnnnnnnnnnnnnnnnnnnnnnnnnnnnnnnnnnnnnnnnnnnnnnnnnnnnnnnnnnnnnnnnnnnnnnnnnnnnnnnnnnnnnnnnnnnnnnnnnnnnnnnnnnnnnnnnnnnnnnnnnnnnnnnnnnnnnnnnnnnnnnnnnnnnnnnnnnnnnnnnnnnnnnnnnnnnntgtccacgagagtagtttaattgagcgtgtaacttcatgatttaaaataatgtatatgattcaacttttaaaccgtataaccaaacgtataactaaaatgatttgctgaaaaaatgcacaattcagggtcggattttcccggatgtttaatttataaaaacgaagctggtggatgatctgcgtggtgatttccaccattcagagcaggggcggtcatcatgcccatgccataacaaaaaccccatattcgtggtttttctgtgttgtggctattctgccgttgccgtgctggtggatatttccgttatggggatcaccatatcggcatcatgcccaccagccagcgcaattttgcgctttgctttaagttcagcaagttaccgcgccggattacgccaatggctggaatatggcgcgtaatccatgagacaccagcacgccagcgaatcccatacgccgcaatgctgcgttagctgtctggctgttcatcggctgctgtgggtctttcagacttgggaaaacgtaattgcggtggtggctgattggtttcatggcctccagcaccgccatagcctgaccggaaagcgggataacgtgatccctgcgcatcttcatgcgtccggcaggtatcgtccattgcttcgcgtccaggttgatttcatcccaccgcgttgatgacgcttcggcgggacgggttacggtcagtaactgccattcaatcagtaatctggtctgccgttctgttgccgatactgataaagcctgcataagctccggcagctgttcggggcggattgttggcatatgtttttttacaggtgagggaaacgccttacgcacattcatagccggattggcatcaatcagcccactgttggcggcgtaatccattacctcattaacgcgctgtaaaacccgcttgagtgtttccaggttgccgcgctccttgatgggtgtaagcacttcaacgaaccttcgggcggtgagggtatctattggcgtgttgccgatgaacgggaatacatatttatccagcgaacgccagatgtctttaatcgtgttgggggccagattctggctgattttcacctggtaccatgccgccgccacattttcgaacgtgttcccttgtcttcgggcctctgtctctcttttttgcctctcgtggtcctgcgggtcagttccggcactgattaacgtcctgtactcgctacggcgttttctggcatcagccagggaaacatcttcaagcgatccaaaactcagcaatattctttttttgtccgatggtcggtagtaggaaaatctccagagttttgatccagacggtttgaccaggagaaaaagccctccgccgtcctgcagggtgtactccttttgcgctggtctggctgctttgatctgcactgtggttaatgggtgtgtttttctcgccatatgtctatgattccacacgaaaaacagggttttagttatacggctttagttatacgtcagcccgtataactaaacgtataactaaaaaatccggctgatagcttataaatccggtgatgttcggtgactaaaaaacataaaaaaacccgccaatcaagtgattagcgggttatccctgtcttatccggtgctttccggtgatatccggtgggcgatttggtcggcnnnnnnnnnnnnnnnnnnnnnnnnnnnnnnnnnnnnnnnnnnnnnnnnnnnnnnnnnnnnnnnnnnnnnnnnnnnnnnnnnnnnnnnnnnnnnnnnnnnnnnnnnnnnnnnnnnnnnnnnnnnnnnnnnnnnnnnnnnnnnnnnnnnnnnnnnnnnnnnnnnnnnnnnnnnnnnnnnnnnnnnnnnnnnnnnnnnnnnnnnnnnnnnnnnnnnnnnnnnnnnnnnnnnnnnnnnnnnnnnnnnnnnnnnnnnnnnnnnnnnnnnnnnnnnnnnnnnnnnnnnnnnnnnnnnnnnnnnnnnnnnnnnnnnnnnnnnnnnnnnnnnnnnnnnnnnnnnnnnnnnnnnnnnnnnnnnnnnnnnnnnnnnnnnnnnnnnnnnnnnnnnnnnnnnnnnnnnnnnnnnnnnnnnnnnnnnnnnnnnnnnnnnnnnnnnnnnnnnnnnnnnnnnnnnnnnnnnnnnnnnnnnnnnnnnnnnnnnnnnnnnnnnnnnnnnnnnnnnnnnnnnnnnnnnnnnnnnnnnnnnnnnnnnnnnnnnnnnnnnnnnnnnnnnnnnnnnnnnnnnnnnnnnnnnnnnnnnnnnnnnnnnnnnnnnnnnnnnnnnnnnnnnnnnnnnnnnnnnnnnnnnnnnnnnnnnnnnnnnnnnnnnnnnnnnnnnnnnnnnnnnnnnnnnnnnnnnnnnnnnnnnnnnnnnnnnnnnnnnnnnnnnnnnnnnnnnnnnnnnnnnnnnnnnnnnnnnnnnnnnnnnnnnnnnnnnnnnnnnnnnnnnnnnnnnnnnnnnnnnnnnnnnnnnnnnnnnnnnnnnnnnnnnnnnnnnnnnnnnnnnnnnnnnnnnnnnnnnnnnnnnnnnnnnnnnnnnnnnnnnnnnnnnnnnnnnnnnnnnnnnnnnnnnnnnnnnnnnnnnnnnnnnnnnnnnnnnnnnnnnnnnnnnnnnnnnnnnnnnnnnnnnnnnnnnnnnnnnnnnnnnnnnnnnnnnnnnnnnnnnnnnnnnnnnnnnnnnnnnnnnnnnnnnnnnnnnnnnnnnnnnnnnnnnnnnnnnnnnnnnnnnnnnnnnnnnnnnnnnnnnnnnnnnnnnnnnnnnnnnnnnnnnnnnnnnnnnnnnnnnnnnnnnnnnnnnnnnnnnnnnnnnnnnnnnnnnnnnnnnnnnnnnnnnnnnnnnnnnnnnnnnnnnnnnnnnnnnnnnnnnnnnnnnnnnnnnnnnnnnnnnnnnnnnnnnnnnnnnnnnnnnnnnnnnnnnnnnnnnnnnnnnnnnnnnnnnnnnnnnnnnnnnnnnnnnnnnnnnnnnnnnnnnnnnnnnnnnnnnnnnnnnnnnnnnnnnnnnnnnnnnnnnnnnnnnnnnnnnnnnnnnnnnnnnnnnnnnnnnnnnnnnnnnnnnnnnnnnnnnnnnnnnnnnnnnnnnnnnnnnnnnnnnnnnnnnnnnnnnnnnnnnnnnnnnnnnnnnnnnnnnnnnnnnnnnnnnnnnnnnnnnnnnnnnnnnnnnnnnnnnnnnnnnnnnnnnnnnnnnnnnnnnnnnnnnnnnnnnnnnnnnnnnnnnnnnnnnnnnnnnnnnnnnnnnnnnnnnnnnnnnnnnnnnnnnnnnnnnnnnnnnnnnnnnnnnnnnnnnnnnnnnnnnnnnnnnnnnnnnnnnnnnnnnnnnnnnnnnnnnnnnnnnnnnnnnnnnnnnnnnnnnnnnnnnnnnnnnnnnnnnnnnnnnnnnnnnnnnnnnnnnnnnnnnnnnnnnnnnnnnnnnnnnnnnnnnnnnnnnnnnnnnnnnnnnnnnnnnnnnnnnnnnnnnnnnnnnnnnnnnnnnnnnnnnnnnnnnnnnnnnnnnnnnnnnnnnnnnnnnnnnnnnnnnnnnnnnnnnnnnnnnnnnnnnnnnnnnnnnnnnnnnnnnnnnnnnnnnnnnnnnnnnnnnnnnnnnnnnnnnnnnnnnnnnnnnnnnnnnnnnnnnnnnnnnnnnnnnnnnnnnnnnnnnnnnnnnnnnnnnnnnnnnnnnnnnnnnnnnnnnnnnnnnnnnnnnnnnnnnnnnnnnnnnnnnnnnnnnnnnnnnnnnnnnnnnnnnnnnnnnnnnnnnnnnnnnnnnnnnnnnnnnnnnnnnnnnnnnnnnnnnnnnnnnnnnnnnnnnnnnnnnnnnnnnnnnnnnnnnnnnnnnnnnnnnnnnnnnnnnnnnnnnnnnnnnnnnnnnnnnnnnnnnnnnnnnnnnnnnnnnnnnnnnnnnnnnnnnnnnnnnnnnnnnnnnnnnnnnnnnnnnnnnnnnnnnnnnnnnnnnnnnnnnnnnnnnnnnnnnnnnnnnnnnnnnnnnnnnnnnnnnnnnnnnnnnnnnnnnnnnnnnnnnnnnnnnnnnnnnnnnnnnnnnnnnnnnnnnnnnnnnnnnnnnnnnnnnnnnnnnnnnnnnnnnnnnnnnnnnnnnnnnnnnnnnnnnnnnnnnnnnnnnnnnnnnnnnnnnnnnnnnnnnnnnnnnnnnnnnnnnnnnnnnnnnnnnnnnnnnnnnnnnnnnnnnnnnnnnnnnnnnnnnnnnnnnnnnnnnnnnnnnnnnnnnnnnnnnnnnnnnnnnnnnnnnnnnnnnnnnnnnnnnnnnnnnnnnnnnnnnnnnnnnnnnnnnnnnnnnnnnnnnnnnnnnnnnnnnnnnnnnnnnnnnnnnnnnnnnnnnnnnnnnnnnnnnnnnnnnnnnnnnnnnnnnnnnnnnnnnnnnnnnnnnnnnnnnnnnnnnnnnnnnnnnnnnnnnnnnnnnnnnnnnnnnnnnnnnnnnnnnnnnnnnnnnnnnnnnnnnnnnnnnnnnnnnnnnnnnnnnnnnnnnnnnnnnnnnnnnnnnnnnnnnnnnnnnnnnnnnnnnnnnnnnnnnnnnnnnnnnnnnnnnnnnnnnnnnnnnnnnnnnnnnnnnnnnnnnnnnnnnnnnnnnnnnnnnnnnnnnnnnnnnnnnnnnnnnnnnnnnnnnnnnnnnnnnnnnnnnnnnnnnnnnnnnnnnnnnnnnnnnnnnnnnnnnnnnnnnnnnnnnnnnnnnnnnnnnnnnnnnnnnnnnnnnnnnnnnnnnnnnnnnnnnnnnnnnnnnnnnnnnnnnnnnnnnnnnnnnnnnnnnnnnnnnnnnnnnnnnnnnnnnnnnnnnnnnnnnnnnnnnnnnnnnnnnnnnnnnnnnnnnnnnnnnnnnnnnnnnnnnnnnnnnnnnnnnnnnnnnnnnnnnnnnnnnnnnnnnnnnnnnnnnnnnnnnnnnnnnnnnnnnnnnnnnnnnnnnnnnnnnnnnnnnnnnnnnnnnnnnnnnnnnnnnnnnnnnnnnnnnnnnnnnnnnnnnnnnnnnnnnnnnnnnnnnnnnnnnnnnnnnnnnnnnnnnnnnnnnnnnnnnnnnnnnnnnnnnnnnnnnnnnnnnnnnnnnnnnnnnnnnnnnnnnnnnnnnnnnnnnnnnnnnnnnnnnnnnnnnnnnnnnnnnnnnnnnnnnnnnnnnnnnnnnnnnnnnnnnnnnnnnnnnnnnnnnnnnnnnnnnnnnnnnnnnnnnnnnnnnnnnnnnnnnnnnnnnnnnnnnnnnnnnnnnnnnnnnnnnnnnnnnnnnnnnnnnnnnnnnnnnnnnnnnnnnnnnnnnnnnnnnnnnnnnnnnnnnnnnnnnnnnnnnnnnnnnnnnnnnnnnnnnnnnnnnnnnnnnnnnnnnnnnnnnnnnnnnnnnnnnnnnnnnnnnnnnnnnnnnnnnnnnnnnnnnnnnnnnnnnnnnnnnnnnnnnnnnnnnnnnnnnnnnnnnnnnnnnnnnnnnnnnnnnnnnnnnnnnnnnnnnnnnnnnnnnnnnnnnnnnnnnnnnnnnnnnnnnnnnnnnnnnnnnnnnnnnnnnnnnnnnnnnnnnnnnnnnnnnnnnnnnnnnnnnnnnnnnnnnnnnnnnnnnnnnnnnnnnnnnnnnnnnnnnnnnnnnnnnnnnnnnnnnnnnnnnnnnnnnnnnnnnnnnnnnnnnnnnnnnnnnnnnnnnnnnnnnnnnnnnnnnnnnnnnnnnnnnnnnnnnnnnnnnnnnnnnnnnnnnnnnnnnnnnnnnnnnnnnnnnnnnnnnnnnnnnnnnnnnnnnnnnnnnnnnnnnnnnnnnnnnnnnnnnnnnnnnnnnnnnnnnnnnnnnnnnnnnnnnnnnnnnnnnnnnnnnnnnnnnnnnnnnataactttcaatatgaccagtgatgagacgctgcgaattgtggatgagtactgtcatacccacaaactttcgcgctctaaggtaatcgacgcattactcagcgccacagcacctgtccttaacgatattaactgttattatcaacttgcaggcaaactgcagtcacgcttattaaatggagtgtatcaacgggatcttcctcacaaacgcaatgtcgtcagtgcagagaagtattgtctggagatctgggaaaacaaacttttcaccaaaagaatcctggagtttgacagttcaaatggtgttctgtacgcgctgaaacataaaagacactatcgccgggataagatgattggacgggttgaaagccggcgtatcaaagacatttgcgaataccagatgcaactgtccggggagaaggcaaaatatgcctgttttatttatattgaaagaacaatatacaatcacgataatccatccggtgggacacctgtaaaagcggctgttggtaatgcagtcatcctgctggcaaaagacgtgatatatgacgagtacttttttgatctgcggcagtcatttttcgtgagcgttaaagatctgatggcctctggcgcaaaaggtattccggagacacagaaatatccggacgtttattgctggatcccgcttttctccataaattccggcgtggtcattaccccggtctataaaattgatccccggaaacccgtaacggtaaaaaaaccggatcagatcactgttgtttgtaattacagagaataatctcagtcttctccgctcaccgcaacagtgtttacctcgctttatcttccgttcagtaaatacaaacctccgctctggcaggtacagggcgtggtttatctccggtactcccctgcacagtaataatcatcactgaaaatactgatcccgtcacggcaaaacgccatcccatattccggcaacacaaaatcatcttccgtttataccggcttcactgacaaaacagacaacctgtattgcctgtacacaacagtttctctcctggcaggaatattcccctactgattttttacgtttctccccggttgttatgccggtgaaggtggtgcgttgttttcatcatcaacgccggctgagattaacaacatccggaggagatttttatgaccaccccagtttcgctgatggatgaccagatggtcgatatgacgtttatcactcagctgaccggcctgaccgataagtggttttacaagctcatcaaggatggggcctttccggcacccatcaaactcggccgcagctcccgctggctgaaaagtgaagtggaagcctggctgcaggcgcgtattgcacagtcccgtccgtaatttttaaccactggcccttcgcccacagcagacgcaatctccggcctgccggcggcactctgctgcctgttatcccccgtgaggaatatgaaaatgaaaccacagtatcagacccgttacgagctgctccacgaaagctaccagaaatggctgaccggcttcacccggcacgccgtatcctggggcgtgtgtcatccgaatatccactacttccagaatctgacgcccgggtgggtgtcattcaatggtgaaaaaccgaagattgccatcgtaccccggagtctgcaccggctgatttatggctctgacaaacgggccacgccgcccctggatgatgatctggtggtgaacttatgcaccagcgaacatctgctggttcatcatccgatgctggaagggattctgctgtctgaatgtgaacgtctgaggcagcgttctctggcaaataaactgatcagcctcttccgtcagtttggtggcacggagttgcgcctcaaactggtctggctttgctggcttgatttaatgaccggaaacagccttgacgactggacggagaacctgaaacggaaatcagaaaaagagctgggggaatggatcatcgaccgtcagaagcagaacgcagcactgacggatctgatggatcagtacgtgctcctggcataccgcacaacggttgacggtaaccgtaactgatgccggttgtttccggaaggtgcggcaaaatacggaaatgatgatacccccggccctgcatgctcacctgcagagcgtgttcgtcgtcatcatactgagccatgacggatgtcttaagggcatcctgtcattgctgagctggcatgctgcggtacatgcctcaccctggtgacaataagtacatggcgacagcactccctgcaccgcaaaagagatgtacacggccggatgttatggctgaatgtttcttcgtcagatattcaggaacagttgtagtaacgaattttaccgatctctgtacacggccggacgccgtcagtgtatacgggcggacgttccatgctgcatgactacatccggcccggatgtcaatgagtccgtcaggaacgcttcgcttcgaaacccggcctggataccagcgccggcacgccgggaagaagttgatatggtggttgccggacaacagcgctcctggattgactgctgcatcactcaaccacgctgaatatcaaaggagagcgttaccgattaaaagagaaacggaaagctgtggtgatgacccaaaacaacacgacaatcagtgaggatggaatggtgaaaatcagactgcatcagtgtagaaaatatactggctggcatgaaaatggcccggctcgtggcgttgacatattctctcctgagcatcctgaatgactgcagttgctgtggaaaagtaagcagtctccacccacggcaccacttaacagacattcagtaactcaccccagactttctataacgcttatcggtgcactgaaaacaggagagtgcgcttaaaaccgcagaccgcattgcgggtgttactgcatgacagcctggcggtattgtgaaatgtcggcaggaaccgatgtctgcgcagggggaacttccgtgatcgggataagtgcagaagaaatcagatcacgacgtaaacctgcagtgcctgacgctgcaagtggcattaaccatgggacgttgccgatcccggattgcggaaacaggagcactattttctgccgcggggagtacctctggcagtaaatccggctcgctcatctgaccgtctctctcccggaaaagaccagaaatgagatcgtcacctcaacagcagggaagatgtcttgacagactggttatattgcatacgatttatgaagaaaaagacagcaaatatggaggctatagcggagaacaccctacgaaattcctgtgaaaaacgattgaaaaaacgatcagattcgattcgtttttatatgctttttgggcacgtggcgatgacgaactgttgcatgtgcagaggagaatgcacccggaagcaccagaatcatccagaaaggcagaacgattacgcatcaaaccaggagacagcaatatcaggataacatactgatttaaaatgaatttacagcaatacgtgaaaacattttttacttaaaggagacagatgcgctgaagacagtgcaggtatttttatataaaaatgagaaggttacgggatgtctatccagcacactatgaccggagaatatcagtcaggcttaaaaagacaataaatacagtgagttaaatacacagagaaaacgaaaacgtagtatcagagggtacatcttacaacagagactgaatttccggtttttcataaccggcacattccggaaagagcaggctaaccggaggctttctgacaccagtccctggcagtttaatctgtacatnnnnnnnnnnnnnnnnnnnnnnnnnnnnnnnnnnnnnnnnnnnnnnnnnnnnnnnnnnnnnnnnnnnnnnnnnnnnnnnnnnnnnnnnnnnnnnnnnnnnnnnnnnnnnnnnnnnnnnnnnnnnnnnnnnnnnnnnnnnnnnnnnnnnnnnnnnnnnnnnnnnnnnnnnnnnnnnnnnnnnnnnnnnnnnnnnnnnnnnnnnnnnnnnnnnnnnnnnnnnnnnnnnnnnnnnnnnnnnnnnnnnnnnnnnnnnnnnnnnnnnnnnnnnnnnnnnnnnnnnnnnnnnnnnnnnnnnnnnnnnnnnnnnnnnnnnnnnnnnnnnnnnnnnnnnnnnnnnnnnnnnnnnnnnnnnnnnnnnnnnnnnnnnnnnnnnnnnnnnnnnnnnnnnnnnnnnnnnnnnnnnnnnnnnnnnnnnnnnnnnnnnnnnnnnnnnnnnnnnnnnnnnnnnnnnnnnnnnnnnnnnnnnnnnnnnnnnnnnnnnnnnnnnnnnnnnnnnnnnnnnnnnnnnnnnnnnnnnnnnnnnnnnnnnnnnnnnnnnnnnnnnnnnnnnnnnnnnnnnnnnnnnnnnnnnnnnnnnnnnnnnnnnnnnnnnnnnnnnnnnnnnnnnnnnnnnnnnnnnnnnnnnnnnnnnnnnnnnnnnnnnnnnnnnnnnnnnnnnnnnnnnnnnnnnnnnnnnnnnnnnnnnnnnnnnnnnnnnnnnnnnnnnnnnnnnnnnnnnnnnnnnnnnnnnnnnnnnnnnnnnnnnnnnnnnnnnnnnnnnnnnnnnnnnnnnnnnnnnnnnnnnnnnnnnnnnnnnnnnnnnnnnnnnnnnnnnnnnnnnnnnnnnnnnnnnnnnnnnnnnnnnnnnnnnnnnnnnnnnnnnnnnnnnnnnnnnnnnnnnnnnnnnnnnnnnnnnnnnnnnnnnnnnnnnnnnnnnnnnnnnnnnnnnnnnnnnnnnnnnnnnnnnnnnnnnnnnnnnnnnnnnnnnnnnnnnnnnnnnnnnnnnnnnnnnnnnnnnnnnnnnnnnnnnnnnnnnnnnnnnnnnnnnnnnnnnnnnnnnnnnnnnnnnnnnnnnnnnnnnnnnnnnnnnnnnnnnnnnnnnnnnnnnnnnnnnnnnnnnnnnnnnnnnnnnnnnnnnnnnnnnnnnnnnnnnnnnnnnnnnnnnnnnnnnnnnnnnnnnnnnnnnnnnnnnnnnnnnnnnnnnnnnnnnnnnnnnnnnnnnnnnnnnnnnnnnnnnnnnnnnnnnnnnnnnnnnnnnnnnnnnnnnnnnnnnnnnnnnnnnnnnnnnnnnnnnnnnnnnnnnnnnnnnnnnnnnnnnnnnnnnnnnnnnnnnnnnnnnnnnnnnnnnnnnnnnnnnnnnnnnnnnnnnnnnnnnnnnnnnnnnnnnnnnnnnnnnnnnnnnnnnnnnnnnnnnnnnnnnnnnnnnnnnnnnnnnnnnnnnnnnnnnnnnnnnnnnnnnnnnnnnnnnnnnnnnnnnnnnnnnnnnnnnnnnnnnnnnnnnnnnnnnnnnnnnnnnnnnnnnnnnnnnnnnnnnnnnnnnnnnnnnnnnnnnnnnnnnnnnnnnnnnnnnnnnnnnnnnnnnnnnnnnnnnnnnnnnnnnnnnnnnnnnnnnnnnnnnnnnnnnnnnnnnnnnnnnnnnnnnnnnnnnnnnnnnnnnnnnnnnnnnnnnnnnnnnnnnnnnnnnnnnnnnnnnnnnnnnnnnnnnnnnnnnnnnnnnnnnnnnnnnnnnnnnnnnnnnnnnnnnnnnnnnnnnnnnnnnnnnnnnnnnnnnnnnnnnnnnnnnnnnnnnnnnnnnnnnnnnnnnnnnnnnnnnnnnnnnnnnnnnnnnnnnnnnnnnnnnnnnnnnnnnnnnnnnnnnnnnnnnnnnnnnnnnnnnnnnnnnnnnnnnnnnnnnnnnnnnnnnnnnnnnnnnnnnnnnnnnnnnnnnnnnnnnnnnnnnnnnnnnnnnnnnnnnnnnnnnnnnnnnnnnnnnnnnnnnnnnnnnnnnnnnnnnnnnnnnnnnnnnnnnnnnnnnnnnnnnnnnnnnnnnnnnnnnnnnnnnnnnnnnnnnnnnnnnnnnnnnnnnnnnnnnnnnnnnnaggtgatatgaaccgttataaccggcgatttccgaatggggaaacccagtgtgtttcgacacactatcattaactgaatccataggttaatgaggcgaaccgggggaactgaaacatctaagtaccccgaggaaaagaaatcaaccgagattcccccagtagcggcgagcgaacggggaggagcccagagcctgaatcagtgtgtgtgttagtggaagcgtctggaaaggcgtgcgatacagggtgacagccccgtacacaaaaatgcacatattgtgagctcgatgagtagggcgggacacgtggtatcctgtctgaatatggggggaccatcctccaaggctaaatactcctgactgaccgatagtgaaccagtaccgtgagggaaaggcgaaaagaaccccggcgaggggagtgaaaaagaacctgaaaccgtgtacgtacaagcagtgggagcctcttaatggggtgactgcgtaccttttgtataatgggtcagcgacttatattctgtagcaaggttaaccgaataggggagccgaagggaaaccgagtcttaactgggcgttaagttgcagggtatagacccgaaacccggtgatctagccatgggcaggttgaaggttgggtaacactaactggaggaccgaaccgactaatgttgaaaaattagcggatgacttgtggctgggggtgaaaggccaatcaaaccgggagatagctggttctccccgaaagctatttaggtagcgcctcgtgaattcatctccgggggtagagcactgtttcggcaagggggtcatcccgacttaccaacccgatgcaaactgcgaataccggagaatgttatcacgggagacacacggcgggttcttgcgaagcagactgacacgtccccttcgtctagaggcccaggacaccgccctttcacggcggtaacaggggttcgaatcccctaggggacgccacttnnnnnnnnnnnnnnnnnnnnnnnnnnnnnnnnnnnnnnnnnnnnnnnnnnnnnnnnnnnnnnnnnnnntttgctctttaaaaatctggatcaagctgaaaattgaaacactgaacaacgagagttgttcgtgagtctctcaaattttcgcaacacgatgatgaatcgcaagaaacatcttcgggttgtgaggttaagcgactaagcgtacacggtggatgccctggcagtcagaggcgatgaaggacgtgctaatctgcgataagcgtcggtgaggtgatatgaaccgttataaccggcgatttccgaatggggaaacccagtgtgtttcgacacactatcattaactgaatccataggttaatgaggcgaaccgggggaactgaaacatctaagtaccccgaggaaaagaaatcaaccgagattcccccagtagcggcgagcgaacggggaggagcccagagcctgaatcagtgtgtgtgttagtggaagcgtctggaaaggcgtgcgatacagggcttttcacccgctttatcgttacttatgtcagcattcgcacttctgatacctccagcaaccctcacaggccaccttcacaggcttacagaacgctcccctacccaacaacacatagtgtcgctgccgcagcttcggtgcatggtttagccccgttacatcttccgcgcaggccgactcgaccagtgagctattacgctttctttaaatgatggctgcttctaagccaacatcctggctgtctgggccttcccacatcgtttcccacttaaccatgactttgggaccttagctggcggtctgggttgtttccctcttcacgacggacgttagcacccgccgtgtgtctcccgtgataacattctccggtattcgcagtttgcatcgggttggtaagnnnnnnnnnnnnnnnnnnnnnnnnnnnnnnnnnnnnnnnnnnnnnnnnnnnnnnnnnnnnnnnnnnnnnnnnnnnnnnnnnnnnnnnnnnnnnnnnnnnnnnnnnnnnnnnnnnnnnnnnnnnnnnnnnnnnnnnnnnnnnnnnnnnnnnnnnnnnnnnnnnnnnnnnnnnnnnnnnnnnnnnnnnnnnnnnnnnnnnnnnnnnnnnnnnnnnnnnnnnnnnnnnnnnnnnnnnnnnnnnnnnnnnnnnnnnnnnnnnnnnnnnnnnnnnnnnnnnnnnnnnnnnnnnnnnnnnnnnnnnnnnnnnnnnnnnnnnnnnnnnnnnnnnnnnnnnnnnnnnnnnnnnnnnnnnnnnnnnnnnnnnnnnnnnnnnnnnnnnnnnnnnnnnnnnnnnnnnnnnnnnnnnnnnnnnnnnnnnnnnnnnnnnnnnnnnnnnnnnnnnnnnnnnnnnnnnnnnnnnnnnnnnnnnnnnnnnnnnnnnnnnnnnnnnnnnnnnnnnnnnnnnnnnnnnnnnnnnnnnnnnnnnnnnnnnnnnnnnnnnnnnnnnnnnnnnnnnnnnnnnnnnnnnnnnnnnnnnnnnnnnnnnnnnnnnnnnnnnnnnnnnnnnnnnnnnnnnnnnnnnnnnnnnnnnnnnnnnnnnnnnnnnnnnnnnnnnnnnnnnnnnnnnnnnnnnnnnnnnnnnnnnnnnnnnnnnnnnnnnnnnnnnnnnnnnnnnnnnnnnnnnnnnnnnnnnnnnnnnnnnnnnnnnnnnnnnnnnnnnnnnnnnnnnnnnnnnnnnnnnnnnnnnnnnnnnnnnnnnnnnnnnnnnnnnnnnnnnnnnnnnnnnnnnnnnnnnnnnnnnnnnnnnnnnnnnnnnnnnnnnnnnnnnnnnnnnnnnnnnnnnnnnnnnnnnnnnnnnnnnnnnnnnnnnnnnnnnnnnnnnnnnnnnnnnnnnnnnnnnnnnnnnnnnnnnnnnnnnnnnnnnnnnnnnnnnnnnnnnnnnnnnnnnnnnnnnnnnnnnnnnnnnnnnnnnnnnnnnnnnnnnnnnnnnnnnnnnnnnnnnnnnnnnnnnnnnnnnnnnnnnnnnnnnnnnnnnnnnnnnnnnnnnnnnnnnnnnnnnnnnnnnnnnnnnnnnnnnnnnnnnnnnnnnnnnnnnnnnnnnnnnnnnnnnnnnnnnnnnnnnnnnnnnnnnnnnnnnnnnnnnnnnnnnnnnnnnnnnnnnnnnnnnnnnnnnnnnnnnnnnnnnnnnnnnnnnnnnnnnnnnnnnnnnnnnnnnnnnnnnnnnnnnnnnnnnnnnnnnnnnnnnnnnnnnnnnnnnnnnnnnnnnnnnnnnnnnnnnnnnnnnnnnnnnnnnnnnnnnnnnnnnnnnnnnnnnnnnnnnnnnnnnnnnnnnnnnnnnnnnnnnnnnnnnnnnnnnnnnnnnnnnnnnnnnnnnnnnnnnnnnnnnnnnnnnnnnnnnnnnnnnnnnnnnnnnnnnnnnnnnnnnnnnnnnnnnnnnnnnnnnnnnnnnnnnnnnnnnnnnnnnnnnnnnnnnnnnnnnnnnnnnnnnnnnnnnnnnnnnnnnnnnnnnnnnnnnnnnnnnnnnnnnnnnnnnnnnnnnnnnnnnnnnnnnnnnnnnnnnnnnnnnnnnnnnnnnnnnnnnnnnnnnnnnnnnnnnnnnnnnnnnnnnnnnnnnnnnnnnnnnnnnnnnnnnnnnnnnnnnnnnnnnnnnnnnnnnnnnnnnnnnnnnnnnnnnnnnnnnnnnnnnnnnnnnnnnnnnnnnnnnnnnnnnnnnnnnnnnnnnnnnnnnnnnnnnnnnnnnnnnnnnnnnnnnnnnnnnnnnnnnnnnnnnnnnnnnnnnnnnnnnnnnnnnnnnnnnnnnnnnnnnnnnnnnnnnnnnnnnnnnnnnnnnnnnnnnnnnnnnnnnnnnnnnnnnnnnnnnnnnnnnnnnnnnnnnnnnnnnnnnnnnnnnnnnnnnnnnnnnnnnnnnnnnnnnnnnnnnnnnnnnnnnnnnnnnnnnnnnnnnnnnnnnnnnnnnnnnnnnnnnnnnnnnnnnnnnnnnnnnnnnnnnnnnnnnnnnnnnnnnnnnnnnnnnnnnnnnnnnnnnnnnnnnnnnnnnnnnnnnnnnnnnnnnnnnnnnnnnnnnnnnnnnnnnnnnnnnnnnnnnnnnnnnnnnnnnnnnnnnnnnnnnnnnnnnnnnnnnnnnnnnnnnnnnnnnnnnnnnnnnnnnnnnnnnnnnnnnnnnnnnnnnnnnnnnnnnnnnnnnnnnnnnnnnnnnnnnnnnnnnnnnnnnnnnnnnnnnnnnnnnnnnnnnnnnnnnnnnnnnnnnnnnnnnnnnnnnnnnnnnnnnnnnnnnnnnnnnnnnnnnnnnnnnnnnnnnnnnnnnnnnnnnnnnnnnnnnnnnnnnnnnnnnnnnnnnnnnnnnnnnnnnnnnnnnnnnnnnnnnnnnnnnnnnnnnnnnnnnnnnnnnnnnnnnnnnnnnnnnnnnnnnnnnnnnnnnnnnnnnnnnnnnnnnnnnnnnnnnnnnnnnnnnnnnnnnnnnnnnnnnnnnnnnnnnnnnnnnnnnnnnnnnnnnnnnnnnnnnnnnnnnnnnnnnnnnnnnnnnnnnnnnnnnnnnnnnnnnnnnnnnnnnnnnnnnnnnnnnnnnnnnnnnnnnnnnnnnnnnnnnnnnnnnnnnnnnnnnnnnnnnnnnnnnnnnnnnnnnnnnnnnnnnnnnnnnnnnnnnnnnnnnnnnnnnnnnnnnnnnnnnnnnnnnnnnnnnnnnnnnnnnnnnnnnnnnnnnnnnnnnnnnnnnnnnnnnnnnnnnnnnnnnnnnnnnnnnnnnnnnnnnnnnnnnnnnnnnnnnnnnnnnnnnnnnnnnnnnnnnnnnnnnnnnnnnnnnnnnnnnnnnnnnnnnnnnnnnnnnnnnnnnnnnnnnnnnnnnnnnnnnnnnnnnnnnnnnnnnnnnnnnnnnnnnnnnnnnnnnnnnnnnnnnnnnnnnnnnnnnnnnnnnnnnnnnnnnnnnnnnnnnnnnnnnnnnnnnnnnnnnnnnnnnnnnnnnnnnnnnnnnnnnnnnnnnnnnnnnnnnnnnnnnnnnnnnnnnnnnnnnnnnnnnnnnnnnnnnnnnnnnnnnnnnnnnnnnnnnnnnnnnnnnnnnnnnnnnnnnnnnnnnnnnnnnnnnnnnnnnnnnnnnnnnnnnnnnnnnnnnnnnnnnnnnnnnnnnnnnnnnnnnnnnnnnnnnnnnnnnnnnnnnnnnnnnnnnnnnnnnnnnnnnnnnnnnnnnnnnnnnnnnnnnnnnnnnnnnnnnnnnnnnnnnnnnnnnnnnnnnnnnnnnnnnnnnnnnnnnnnnnnnnnnnnnnnnnnnnnnnnnnnnnnnnnnnnnnnnnnnnnnnnnnnnnnnnnnnnnnnnnnnnnnnnnnnnnnnnnnnnnnnnnnnnnnnnnnnnnnnnnnnnnnnnnnnnnnnnnnnnnnnnnnnnnnnnnnnnnnnnnnnnnnnnnnnnnnnnnnnnnnnnnnnnnnnnnnnnnnnnnnnnnnnnnnnnnnnnnnnnnnnnnnnnnnnnnnnnnnnnnnnnnnnnnnnnnnnnnnnnnnnnnnnnnnnnnnnnnnnnnnnnnnnnnnnnnnnnnnnnnnnnnnnnnnnnnnnnnnnnnnnnnnnnnnnnnnnnnnnnnnnnnnnnnnnnnnnnnnnnnnnnnnnnnnnnnnnnnnnnnnnnnnnnnnnnnnnnnnnnnnnnnnnnnnnnnnnnnacaaaatggacgatggggagaatgatctcatttaacacatcttcgccttacgccaacgctaatggaagattaagaaagtgggcaaaaaataataatatcagtttaaagtaagcttcagaatgaaattatatggacgaaaaatccctctatgcccatatccttaacctgactgcaccatggcaggttaaatcccttaccctcgatgaaaatgcaggttccgttactgttacagtcggaattgctgaaaatactcagttaacctgtccgacctgcaggaaatcctgttctgttcacgatcaccgacatcgtaaatggcgccaccttgatacctgccagttcatgacattagtagaagccgatgttccccgcgttatgtgcccggagcatggctgccagactctgcctgtaccgtgggcaggttccggcagtcggtacactctgctgttcgaatcgttcgtgctctcatggcttaaaatcagcaccgttgatgcggtcagaaaacaacttaaacttagctggaatgccgttgacggcatcatgacccgcgcggttaagcgaggcctgtcgcggattaaaaagcctttatcagtgcgtcatatgaatgtagacgaagtcgcctttaaaaaagggcataggtatataaccgtggtatctgatcgcgacgggcgggcactggcattaaccgatgatcgtggcacagagagtcttgccagctatctccgttcgcttactgacagtcagttgttggccatcaaaacactgtcgatggacatgaatgcgggctatataagagcagcgcgtatccatttacccaatgcggtcgagaaaatcgccttcgatcgcttccatgtggcgaagcaactgggcgaagtggttgataaaacccgccagaatgaacatccgcacctccctgttgaaagtcgtcgtcaggccaaaggtacccgcttcctgtggcagtacagcgacaaatggatgactgagtcccggcaggaaaagctgatgtggttgcgggaacagatgcaacagacaagccagtgctggacactgaaagagctggcaaaaaatatctgggatcgcccctggagcacagaacgcaggaatgactggttgcagtggatatcgctggcgtctgaatgtgatgtgccgatgatgaaaaacgcagcgaaaaccattaaaaaacggttatacggaatactgaatgcaatgcgtcatcgcgtctcgaatggaaatgcggaggcgctgaacagcaagatcagactgctgaggataaaggccaggggataccgaaaccgggaacgctttaaactgggagttatgttccactatgggaaactgaatatggcgtactgagtcttcccaccatgatcggggaagacccatatcagagcagacaacaaaaaacaaatgagatcaaggtaatatctcttcacttgcgggctcgaacagcaggcaattgccaatataataatctggcacaagggtgaaaaacgcgcaccgcataaaccgttgttattgcttacagattagccggatgccttaatagacatccgcgccttttcggttatggctcggaaatctacgaacatctacacagtttactggaacgttttgggccacagcgttcgcagcaccgtcctgatatgccgttctggcgattataagtcgacggattctggcaaatagacgatgatgatatgcttaatgatgttcaaagaaattaggccattattatattattgcttgcattttctttcattcctaaaagcacccgccattaatcccaggcgcattatgcaaaggaaaatgattaggtaaacaataagatttataatcaggaaaggcgactcgcaataaaacggaaagtcgccttaacattggtaaaatatgccctttactactcctgtatcatgaacggctcatcacatttaaagctgacgttgatccagactaccatatattgcctttatttcattttttacgccttcgccacggtacaccaaagacgtatcgtatcgttgatacttatcttcccgtgcagcactgaaccagttaaaagatccgacacacagcagttcttcatcctcaatcacaattttgctgtggacacgattaaccaatttcgtagcgatacccatcttattgagcttttcaacagcatcattcagcagatgttgtttctcctgacgcttatcatcatcgacatgcgctatattgcagtttttatccgtcaccacggtaatatcaatgccccgggaacgggccaaagccattgatgccagaaatcccgtttgctccactttttgccaagataaccaaggggaaataatcgttattttcttttgagctccggcaagagtcttgttcaaaaatccatcatgctgctccacaccatgcagcgttgaaatttgtgtatgtgcggaaattaaatcctgtcgtttctgaaactcaaattgcaacgcattattatctgaagaaaagagatattttgccaataaccctcgcggcgaaaatgcgggctgcatctcgataaggtccatatcgccaaataccagaaaactatctttagcgcgtgagacagcaacattgaggatactgctgttgctatcaagaaacctgccatcttcatgttttgagtagacaggagaaaagagaacaatcgccctttccgccccctgcaaggagtgcacagtccccactgtcagtgaaccctgctcgtctttgccattaatttccagcttacgcaatgacgttttgatagcattaacctgcgccgaaaatggcgtcacaacaccaacaactttgtacagtggttccccgtaatggcgctctatatcatccttatgtgccaccagccatgctgctattgtttcagcttcaagagggttataacggcttcctccatttggcttcatgcctctaccatcaatatgtaaatatcccattgcggggaaaatcgtccctttttccatccctcttttaggctgcaacttaccgtgatagcaaagtgagttacagtagccgatgaagtggtttactgaatttggccacctgaacagaggtgatatgctcacctcagaacaacacaggtgccataatgaaaaaaagaaatttcagcgcagagtttaaacgcgaatccgctcaactggtcgttgaccagaattacaccgtggcagatgcagccagcgctatggatgtcggcctttccacaatgacgcgatgggtgaaacaattacgtgatgagcggcagggaaaaacaccaaaagcctcccctattaccccggaacaaattgaaatccgtgagctcaggaaaaagctacaacgtattgaaatggaaaatgaaatattaaaaaaggctaccgcgctcttgatgtcagactccctgaacagttctcgataatcgggaaactcagggcgcgttatcctgtggccactctctgccatgtgttcggggtccatcgcagcagctacaaatactggaaaaaccgtcctgaaaagccagacggcagacgggctgtattacgcagccaggtacttgaactgcatggcatcagccacggctctgccggagcaagaagcatcgccacaatggcaacccagagaggctaccagatggggcgctggcttgctggcagactcatgaaagagctggggctggtcagctgtcagcagccgacttaccggtataaacgtggtggtcatgaacatgttgctatccctaactaccttgaacggcagttcgccgtgaccgagccaaatcaggtgtggtgcggtgatgtgacctatatctggacgggtaagcgctgggcgtacctcgccgttgttctcgacctgttcgcaagaaaaccagtgggctgggccatgtcgttctcgccggacagcaggcttaccatgaaagcactggaaatggcatgggaaacccgtggtaagcccgtcggggtgatgttccacagcgatcaaggcagtcattatacgagcaggcagttccggcagttactgtggagataccggatcaggcagagtatgagtcggcgtggaaactgctgggataacagcccaatggagcgcttcttcaggagtctgaagaacgaatgggtgccggcgacgggctatgtaagcttcagcgatgcagctcacgcaataacggactatatcgttggatattacagcgcactaagaccgcacgaatataatggtgggttaccaccaaacgaatcggaaaatcgatactggaaaaaactctaactcggtggccagtttttgttgaccacttcacttatactcgccagggatatgcaattgaagcaattaccgccacgattgactggataaaagagaacggtttttcactcatcaaagccggtgtgaatccggaaaataccctttcaaaaaaattacttatcaggattggcttcaatttttcgagcatcgaagatgggtgagcatatttatgttctggattaaacaaaaggagaataatctcccgaagggaaaagccgatgaggccatttcaggcgtacttcaacatgcattcgtcagtgtcatctgccttttccagtaaatgggttggcattcaatttccaaagtacatcacactttttctactgaaacatatccctcctataactacgtgttaatattcgctccgtaaatacctttcaactcaacccgaggctttgatgctggagaatgtaatcatccgataatcagttccccgaccttttcaggccggactgattatcaatgcgccgaaatcgaatgcggacaccgcggtgtgtttgcacgttttgcacatgatgattaaacaggttcttcagtatgaatttatcccgtcaggaacaacgtacgttacacgttctcgctaaaggtggacgtattgcgcacgtccgcgattcttcaggccgcgtcacttccgttgaatgctacagccgcgaagggctgttgctgaccgactgcacgctcgccgtcttcaaaaaactcaaaaccaaaaaacttatcaagtccgtcaatggtcagccctatcgaatcaacactaccgggctgaataacgttcgcgctcagctcgataatcgctaaggagagtttcgatgacagcacaccacttcacttttcaaatcacagatgaaagtgatgccagtgatatccgggaagtcgaaacccgcgcatttggcttcagcaaagaagccgatttaacggcctctttacttgaggatgaaagcgcgcgccctgcgttatcgctgctggcccgacatgaaggcaaagccgtcgggcatattttatttacccgggcaaccttcaaaggggaaatggattcaccgctgatgcatatcctcgctcccctggcagtcataccggaataccaggggatgggcgtgggaggacggttgatacgcactggcatcgagcacctgaggttgatgggctgccagacggtttttgttctcggccacgccacctattacccccgacatgggttcgaaccctgtgccggagacaaaggctatccggcaccttatcccatcccggaggagcacaaagcctgctggatgatgcaagcactcaccgctcagcccatgaacgtgaccggccacatccagtgcgcgcaggccctgatgaaaccggagcactggcgtgaataacaatcttgttgtgccctttttaatgcttaacccaataacaggaattaactaatggatattccacgtatttttaccatcagtgaaagcgaacaccgcatccacaacccgttcaccgaagagaagtacgccacgctgggtcgcgtgctgcgcatgaaaccagagacccgaattctggacctcggcagcggctcgggcgagatgctctgcacctgggcccgggatcatggcattacggggactggaatcgacatgagttcgctcttcaccgcgcaggccagacgccgcgcggaagaactcggcgtcagcgaacgcgtacattttattcataatgatgcggcgggttacgtcgccaatgaaaaatgtgacgtagcagcctgcgttggcgcgacctggattgccggaggctttgccgggacagtcgaactgctggcgcagagccttaaaccgggcgggatcatgctcatcggtgaaccttactggcgtcagcttccggcaacggacgagatagcccaggcctgtggcgtcagctcgacgaccgattttctgacgctaccagggcttgtcagcgcgtttgacgacctcggctacgacgtggtggaaatggtactggcggaccaggaaggctgggaccgatatgaggccgcgaaatggctgaccatgcgccgctggctggaggccaatcctgacgatgacttcgccgccgaagtcagggccgagctaaacatctcgccgaaacgccacgtaacgtacgcgcgggaatactttggctggggcgtgttcgcactcatcgctaggtaacaacaggttcccggtatttctgactggagataccgggggcttagcctttgctttaatctgatgcatcacctgcacaatacatattcagtatgtttattaatcaagatgtcaccataaggagcatcatatgtcacaacatgaacagttctgtcaggcttgcggaatgccgatgtcggcaccagatgcacacagtgccagtgatcaatattgtgcgtactgcagcgacagcaacggcaatctcaaaccctgggaagaagcggtatcaggtttagccagcttccttgattcctggcaaaaagtcggcccggaggaagcacataagcgtgcaaaacgttatctgacggcaatgccagcctgggctcataaagcggagagtgatttgagctgattatctatactccctctgaatctattcaggagatccgatgttttcttacattatgctgggaaccaacgacctgccacgcgccattacattctaagatccgctgatggagatgctggggtatccacgtgcaggacgtaatgaagagggagcgtcctgcaacaaagtggtgcgataacagttaccgcgttttattcattctcattatttcaaccataatcactggtctctctagcccgtaactttcacaaacgttgagcgcttttattccactcggctcacataattttttatttgttcagctttgcgcgttttcacgtgaacgttctcacaattattcgaccagtctgcgcctataaaacgctcaacgagtgattgttttacggtctacggagatagctatgtcattttctgtgcaggaaaccctgttctcgcttttgcagcacaatgcgatttcaggacacgaaaacgctgtcgctgacgtcatgctgtgcgaattcaggcgtcaggcaaaagaggtctggcgagacaggcttgggaatgtcgtcgcgcgctacggtagtgataaacccgatgcgctgcgactgatgatttttgcgcatatggatgaagtcggttttatggtgcgcaaaatagagccttctggatttttacgctttgaacgcgtaggcggtcctgcgcaggtcactatggctggatccatcgtcaccctcaccggggacaaagggccagtcatggggtgtatcggcattaagtcctaccactttgccaaaggcgacgagcgcacgcagtcaccttctgtcgacaaactgtggattgatattggtgccaaagacaaagacgacgctatacgaatgggcattcaggtcggtacgcctgtcactctgtataacccgccgcaactcctggcaaacgatctggtgtgcagtaaagcactagacgatcgtctgggctgtactgccctgctcggtgtagcggatgctatcagtactacggagcttgatatcgccgtttatctggtagcttcggtacaggaagaatttaatatccgcggcattgttcccgtattacgccgtgtaaaacctgacctggcgattggtattgatatcactccatcgtgtgacacccctgatttacacgattattccgaggtcaggattaatcagggcgttgggatcacctgcctgaactaccatggtcggggaacgctggccggattaatcacgcctcctcgcctgatacggatgttggaacagacggctcttgaacacaacattccggtgcagcgagaagtggctcccggcgtgataacagaaaccggttatatccaggttgagcaggatggtattccctgcgccagtctctctattccttgtcgctatacccattctccggcggaggttgccagcctgcgtgatttgactgattgcatccgcctattgaccgctctggcaggtatgtcagcagcacatttccccgttgagcctgattcaggcactacacaagaggcacatccattatgaaaaagatccttgtggcatgcggtaccggcatgtcgacttcaaccatgattgcacacaagctgcaagagttcctgactgaacagggcatttcagccactaccgcccaatgctgtctgaatgagatccctcttaactgtaacggtatggaccttattgtaacctccatgcgaaccaacagtgattacggcatccctacgcttaatggcgccgccctgctcacagggatcaacgacgacgcgttaaaacaacaaatcaaggctctgttaactcaataaaaggaggcattatgtttgattacatcctgtctctcggcggtaccgttttcgtccctatcatcatgatcgtgattggccttatcttccgcatcccctggctgcaggcgattaaggcaggggtaacggttgggattggttttgtcggtatgggactggtgatcgtcatggcgatcgacagcctcagtccccctatcaaagtgatgattgagcgtttcggcctggccctgcatgtctttgacgttggcgcaggccctgcctccggcgttggttatgcgacagccattggcgccatgattatcccagttatttttcttctcaatgtcgccatgctggtcacccgtctgaccaaaacgatgaacgtcgatatttacaattactggcactacgccattacgggtacggtggtccagcttatgaccggtagcctgatttatggtgtgctgggggcaatctgccatgcggcgctatcgttaaaaatggccgactggacggcaaaacgggtacagaacatcgtcgggctggaaggtatttcgataccgcaaggctacggttccagttcagtaccgcttttcgttctacttgatgctatctatgaaaaaatccctttcatgaagggacgcaatatcgatgctcaggagatccagaaacgctacggcatggtcggcgatccggtgattatcggcgtagtgctcggtctgatttttggcctggcggctggtgaaggctttaaaggttgcgccagtctgatgattaccgttgcggcaatcatggtgctgttcccgcgcatgatccgcctgattgttgagggcctgatgcccatctccgacggtgcaagaaagttcttccagaaatatttcaaaggacgtgaagtgtatatcggtctggatactgctgtgacgctggggcatccaaccaccattgctgtcggtctgctactgatacccattatgttaattctggccagcattttaccgggcaacaaagtgttacccctcgcagacctgccggtagcaccgttctttatctgtatggctacggttatccaccgcggagacctggtcaggacgttgataagcggggtcatcgtgatgattaccgtcctgctgatcgccacccagttcgcgccttacttcactgaaatggcgctcaaaggcggtttcagttttgccggtgaaagtgcgcaaatctcagcgttgtccgtgggcaatatgttcggttggtcgatttctgaattgatgtcgcttgggattattggcgttgtcgtggcggtcggtattgtcgccagcgtcgtgctgttcttacgtaaacgtgaattatcggaataaggagtactttcaatgagttggctgaaagaggttattgggacggaaaaagcggtcatcgccatgtgccatctacgtgcattgcccggcgacccgagttttgatgcgcagttggggatgaactgggttatcgacaaagcctgggacgatctgatggcgctccaaaatggtggggtggatgcagtcatgttctccaacgagtttagtcttccctatctcacgaaggtgcgtccggaaaccactgcggcaatggcacgaatcatcgggcaattaatgagcgatatccgcatcccgtttggcgtgaatgttctgtgggatccggtcgcctcattcgacctggcgatggctaccggcgctaagtttatccgcgagatatttaccggtgcctatgccagcgactttggcgtctgggacactaacgtcggtgagaccatccgtcatcaacaccggattggtgcaggcgaagtgaaaaccttgttcaatatcgtcccagaggccgccgtgtatctgggcaatcgcgatatctgttctattgctaaatcgacagtatttaacaaccatcctgatgcgctctgtgtttctggcctgaccgccgggacgcgtacagacagcgcgctgttaaaacgggtcaaagaaacggtgcctgacaccgtcgtgttggccaacacgggcgtctgcctggaaaacgtggaggaacaactcagtatcgccgatggctgtgtgaccgcaaccacctttaaaaaggacggcgtttttgccaatttcgttgaccaggcgcgagtcagtcagtttatggagaaagtgcatcatatacgccgataagatagggataagcagagcgcttatccccggcaaagagcaataacccttctgcgatccctgccgccttcgtcaaaagtatcgacggggatcgctaccagattaacccgaatcggcatggagtcaacgacggatgattaacgatattaaatgggtacaggcacaacgtgaagccaccgactggcgtcaggccgtggaaatcgccacccgcccgctggtagcctatggtgccgcgcagccatgctacgttaatgggatcatcgaaaatacccttaactgggggccttattatctgatagccccaggaatcgccttgcctcacgcccgaccagagcaaggcgcaaactataatcaggtcagtatcaccacgctacgcaccccggtcgcctttggtaacgaggagtgcgaccccgtctggctgcttctctgcgtcagcgccacagatgccaacgcacatattttgaccattcagcgcatcagccagtttattgattcgccacaacgcttagcggcagtgggaaatgccagcacagacgatgcactgtttgcgctggtatcaggttaacggaggcgcttatgatcctgcacccttctctcgccagcgcaaatcctctgcactatggtcgtgagctgacggcattggacaatctggattttgggagcctgcatctggatattgaggacagcagcttcattaacaacattacgtttgggatgaaaacggtgcaggccgtcgccagacagacgcctcatcccttgtcctttcatttcatggttgcccggccacagcgctggtttaacgcgctggctgaaatcagacccgcgtggatcttcgttcatgcagaaacgctggactatccttcggaaacgttaactgagatccgccataccggcgcacgagccggactggtatttaatccggcaaccccgatcgacgcctggcgatatctggcgtctgagctggacggagtgatggtgatgaccagtgagcccgatgggcagggacagcggtttattccctccatgtgcgagaaaatccaaaaagtacgcacggcttttcctcagaccgagtgctgggccgacggtggaattacgctggcagctgcacagcaactggcagcagccggggcgcaacatatggtgattgggcgcgccctgttctcttcatctgactatcgcgcgaccttagctcaattcgccaccctgtaagaggagattgtttctgatgagccaacagagacctgaccgtatcaaacagatgctgcactacctgtggcaacatcgtcacctctccacacagcaggccatggagctttttggctatgcggaagcgactgtccgtcgtgatttccagtatattgccaaccagtatccaggcatgatccgcggtcacggttgcctggacttcgacgacagtacagacgacaaagagtacgtcttcgacgtgaaacgtacattgcaatctgtggcgaaaagagaaatagctgcccttgcccgaacaatgatcaaagatggcgactgcttttttctcgactccggctcaacctgcctcgaactggcgaaatgcctggccgatgcgcgggtaaaggtcatctgcaacgacattaaaatcgccaatgaactgggctgttttccccatgtggaaagttacattatcggaggactgattcgcccaggttatttttcggtaggagagagtctggcgctggagatgatcaatgccttttccgtagaacgtgcgtttatctcctgcgatgcgctgtcgctggagacggggatcaccaatgccaccatgtttgaggtcggggtgaaaacacggattattcaacgctcgcgtgaagttattctcatggccgatcactcaaaatttgatgccgttgagccgcatgctgtagcaacactatcatgtattaaaacgatcatcagtgacagcgggttacctgagactattgcacagcgttatcagcgagccggatgtcagttgtttttacctcattcaataaagtgataagtaagttcgttcgagagggatttcaagcaaaaataatcaatggcacccaatagaaaatattggcgatgcgctcgaacgaataaagaagccctatgcgcaatccacacgctacgatgttgcaacaacacgccatctactttttattctcattcactaaatgtggttgttctggattcattattcaaagtgtgtacaagatcacatttaatcacttcattacagttcagcatgctgaacaaagcatattttccactatgtaatgccgataccatttattccatgagcaagaaggagccattatggttcgcaaagggtgtaattcattagtccgtgctgaaaaaatattaacccacattgcatgggttggtatggcaagttatatggagttattaaataaattccagtaccccaaaagcagcctgcttaatttattgaatgtaatggtggagtgtggtttcttaattaaaaacaaaaacggctactattcactgggaataaaaaactacgaattgggttgtcaggcgttacaccgtcaaaatatatttgaggtgactaagcggccaatgcaggagttgtcgctgaaaagtggactggtttgtcatcttggggcgatggagagcatttcggctatctatctcgacaagatcgaaagtccggactctgtaccgacgagcaaaagctggattggcaaaaaacttgagttgcatattaccgcgttgggtaaggcattattagcctggaagacacgagaagaactggattattttttagaagcactcacgttaactccacatacgcgcaatacatttaccgataaaaaattgtttctggaagaattacaaaaaacacgccttcggggatgggccatagacaacgaagaatcaacctatggggcggtatgtttaagtatgccggtattcaatatgtataacagagttaactatgcaatctcactttctggcgatccggtagtttattcaggaaataagatagacagctatctggaattgctccggaaatgcgctgagcaaatatcatatgggctgggatacagaaacgaaaatgagcatttacgaaaaggaaactgaggtaatgaaaaaattcagcggcattattccaccggtatccagcacgtttcatcgtgacggaacccttgataaaaaggcaatgcgcgaagttgccgacttcctgattaataaaggggtcgacgggctgttttatctgggtaccggtggtgaatttagccaaatgaatacagcccagcgcatggcgctcgccgaagaagctgtaaccattgtcgacgggcgagtgccggtattgattggcgtcggttccccttccactgacgaagcggtcaaactggcgcagcatgcgcaagcctacggcgctgatggtatcgtcgccatcaacccctactactggaaagtcgcaccacgaaatcttgacgactattaccagcagatcgcccgtagcgtcaccctaccggtgatcctgtacaactttccggatctgacgggtcaggacttaaccccggaaaccgtgacgcgtctggctctgcaaaacgagaatatcgttggcatcaaagacaccatcgacagcgttggtcacttgcgtacgatgatcaacacagttaagtcggtacgcccgtcgttttcggtattctgcggttacgatgatcatttgctgaatacgatgctgctgggcggcgacggtgcgataaccgccagcgctaactttgctccggaactctccgtcggcatctaccgcgcctggcgtgaaggcgatctggcgaccgctgcgacgctgaataaaaaactactacaactgcccgctatttacgccctcgaaacaccgtttgtctcactgatcaaatacagcatgcagtgtgtcgggctgcctgtagagacatattgcttaccaccgattcttgaagcatcagaagaagcaaaagataaagtccacgtgctgcttaccgcgcagggcattttaccagtctgaggagaaactcatgtctgttcgcaatatttttgctgacgagagccacgatatttacaccgtcagaacgcacgccgatggcccggacggcgaactcccattaaccgcagagatgcttatcaaccgcccgagcggggatctgttcggtatgaccatgaatgccggaatgggttggtctccggacgagctggatcgggacggtattttactgctcagtacactcggtggcttacgcggcgcagacggtaaacccgtggcgctggcgctgcaccaggggcattacgaactggacatccagataaaagcggcggccgaggttattaaagccaaccatgccctgccctatgccgtgtacgtctccgatccttgtgacgggcgtactcagggtacaacggggatgtttgattcgctaccataccgaaatgacgcatcgatggtaatgcgccgccttattcgctctctgcccgacgcgaaagcagttattggtgtggcgagttgcgataaggggcttccggccaccatgatggcactcgccgcgcagcacaacatcgcaaccgtgctggtccccggcggcgcgacgctgcccgcaaaggatggagaagacaacggcaaggtgcaaaccattggcgcacgcttcgccaatggcgaattatctctacaggacgcacgccgtgcgggctgtaaagcctgtgcctcttccggcggcggctgtcaatttttgggcactgccgggacatctcaggtggtggccgaaggattggggctggcaatcccacattcagcccttgccccttccggtgagcctgtgtggcgggagatcgccagagcttccgcgcgagctgcgctgaacctgagtcaaaaaggcatcaccacccgggaaattctcaccgataaagcgatagagaatgcgatgacggtccatgccgcgttcggtggttcaacaaacctgctgttacacatcccggcaattgctcaccaggcaggttgccatatcccgaccgttgatgactggatccgcatcaacaagcgcgtgccccgactggtgagcgtactgcctaatggcccggtttatcatccaacggtcaatgcctttatggcaggtggtgtgccggaagtcatgttgcatctgcgcagcctcggattgttgcatgaagacgttatgacggttaccggcagcacgctgaaagaaaacctcgactggtgggagcactccgaacggcgtcagcggttcaagcaactcctgctcgatcaggaacaaatcaacgctgacgaagtgatcatgtctccgcagcaagcaaaagcgcgcggattaacctcaactatcaccttcccggtgggtaatattgcgccagaaggttcggtgatcaaatccaccgccattgacccctcgatgattgatgagcaaggtatctattaccataaaggtgtggcgaaggtttatctgtccgagaaaagtgcgatttacgatatcaaacatgacaagatcaaggcgggcgatattctggtcattattggcgttggaccttcaggtacagggatggaagaaacctaccaggttaccagtgccctgaagcatctgtcatacggtaagcatgtttcgttaatcaccgatgcacgtttctcgggcgtttctactggcgcgtgcatcggccatgtggggccagaagcgctggccggaggccccatcggtaaattacgcaccggggatgtaattgaaattaaaattgattgtcgcgagcttcacggcgaagtcaatttcctcggaacccgtagcgatgaacaattaccttcacaggaggaggcaactgcaatattaaatgccagacccagccatcaggatttacttcccgatcctgaattgccagatgatacccagctatgggcaatgcttcaggccgtgagtggcgggacatggaccggttgtatttatgatgtaaacaaaattggcgcggctttgcgcgattttatgaataaaaactgaaagcataaataaaaacatccagacacctgaattatccgactctgcatcattcgttatttgctcagtcggataatgatgggtcgctaccctgttatgagaggacgttatgccactaattatcgttgtggcagggattgctttactcctgcttttaaccataaaaattaagcttaatacgtttgtttcgttaattattgtctcgattgctgtcgccatcgccagtggtatggatttgagtaaagtcgtcacctcagtcgaatccgggcttggcggtacgctgggccatattggtttgatatttggcttcggtgttatgctcggtcgcttgctggccgatgcgggtggtgcgcagcgaatagcgctgaccatgctgaattatttcgggaaaaataaacttgactgggcagtggtctgttcggcgtttattgtcggtatcgcactttttttcgaagtcggtttaattcttctggtacctattttattcgctattgcccgtgaagcaaaaatatcaccgatgtttatgtgtgtgccgatgctttctggtttgctggtcgcacacggttttttgccgccgcaccccggcccgactgttatcgccagggaatatggcgctgatgtaggattggtactgatatacggtatcattgtcggcattccaacctttattctttgcggcccggtattgaataaattctgccagcgcattattccggacgcctttaaaaaagaggggaatatagcctctctcggcgcgacccgccgattcagcgaaagcgaaatgccaggctttgggatcagttttctcacggcaatgctgccggtgatcctgatggcggttgtcaccatcatccagatgactcatgccaaaagtgccgcggattctggcttattttacaacgtgatactgttcttaggtaattcgacgatcgccatgctgatttcactgctgttcgcgatctataccatgggcctggggcgcgggaaaacaatccctgacctgatggattcttgcggaaaagctatcgcgggtattgccggtctgctgctgattatcggtggtggtggtgcattcaagcaagttctcatcgactctggcgttggtcagtatatttccaccctggtttcgggtatggatattaacccgatcttgatggcctggggcgtggccgcattcctgcgtatttgtctgggttcagccaccgtcgcggcgatctctaccgccggtctggtcatcccattgttggcagtacatcccaataccaacctggccttgattacgctggctaccggtgccggatcctgtatttgttctcacgttaacgatgccagtttctggatgattaaagacttttttggcctgaccaccaaagaaacgctgttatcctggacgttgatgtccacactcttatccatcagtgggctgatttttattctgctcgccagcttagttttataatcgggttcttgccagtgagccaacctgttgttcactgtcccccataatttagtgagtgacggcaaccgtctgcacggtgacgaatcgctggcgatcaaaaaggggcgatattgaaccgtcgattatgcttgatgggtgtactctcagtaatactgtaaagccggagcatgtctccgactttacagtataggggaacagcaggcgatcgctcaaatggtatgctggtttatttcatgtaaaagaataaaatatctgtataaaatcatgccactggcaatctgcatcaactctccgggtaaacagggttaagatgagcatttccccggtttaatacaggtatacaaaagtggatagagatcaaacaaacagcagcctgttcaatgatgatcccgtacttcatgcaacatggctgtactatcaggaaggcaaaagccagactgaagttgcagctatcatgggggtgtcccgcgtcacggttgtcaaatacctgcaaacagcccgggaaaatggactggttcatatcaacctggatgtgaatgtctttggctctatcgacgctgctttgcaaattcgcgataaattcaatctccagagagtgatcatcgtgccggatggcgaacatgccggaaaacgtgatgatacaaagctgatgcggactcgcctttcacgtgccggtggcatgtatctgaatcaggtgattgagaatggtgatgtgctgggggttgcctggggaagaacaatccatcagatgagcaaaaccatgacgccgaagtcatgtaaaaatgtcaccgttatacagatgctcggttccatgccatctcagccagacctgacgatcattgaatcctcatcgcaaatcgcctacaagctttcaggccgtgtcgcctcgctgcacgtgcccgccgtggtatcaagcgccagactggccatggagttacaggcagagcctattattcgatcgaattttgacgttctgactcgctgtacgaaagccttttttgtcgtgggtaacgcgcttgatgaaaatcccctgattcgggtgggcgtgctgaataagaaggaaatgcagacgtatcgggatttaggcgcagtaggtgtcatttgtggtcgcttctatgacaaggaagggatgcccgtcgtggctgatgttgaccagcgtattctgggaatcagtctggctcagctaaggcagattgaacggaagatcttccttgctggtggggaaagaggctatgacgcaacgttgggtgccctgctgggaggatatgtcacggacctgattgttgatgaaggaacggcagagtttttgctggcgtgtgaattaccacactaaaagaatgaacaactgccccatgtggatatggggcaggattttattgattagcggcgataataagaacaatacccacaatgtatgaaataaacatggtcagcagcagtttattggttccggctggcgcactggcaaattctctccagatgaagactccccagatcacggcaatcattgtggccccctgtcccagaccgtaggaaatggcataccccgcctgaccagacgcaatcagactgaatgccagaccgacacaccaaatcataccgcccagccagccgcaaacatgatcccgtaagctcccggaaaaatacattttcccgttgaccggttctcctgaaataggttttttcatgaccagcgtgttaaggacaaagttcgacaagaacagccccacggcaaacagaacaagtgctgagtaaggcgtcatcagaccgctggcaggctggctgaaattgtcagacatggagtccgccaagaagcggaaaaaccatcccatgatgatacccgccagaatggcagtaatgagacctttattacggcgagatttatccgcctcctgcgtgacacgaccataggctatcgcggtaaaaataatggcgctcacaacgcaggcgacaccgaggaacagaatgagcggatcgccctgcggattgccgatataggtggtgatcacacccagagccagtgccagccccacacccacaggaaaagctaccgccataccggcaagattaatagaagcgaccagaagaatattggaaatattgaagataatccctgccagtattgccgacatcagactactgctgctcgcctgctgaatatcaggtataaaactgcgaccggcttcgcccatagaacccagcgtgaaggcaaataacaaagaacacagcaataatccaattgaataatcccaatagaatagagggaactcccattttttattgctgacaagtttagttgtattcgcccatgaaccccagcaaatcatggtaataaaacacattattatggcgacagcatacgattccacgataaacataaataactccttgtggtagttataatcaatcgttgtggacagagggaatagcagccattctgcgaatggctgtcatatgttattaattaaaataaagctgtaattacgctttcaaaccatacgttttgaatttttcaaggacgatggtcatttcggcttcagacagcacgggaacatcgtgatgtaatccgccacatttgatgtataaatcagccagcgtctcggtttcacccgccagccacaacgtcttttccagcgtgacgtccatggccagcataccgtggtgctgcatcagcaaggacttactttctctgattcctttagatacaccgtcggccagttcaggactgccaaaggtataatagggaatacagggaatatgatccgtccccgataccgccaccatataatgaatggccggaattgaatgattatgtattgccaccgccgtggaattcaccgcatgcgtatgtatgacagcattcaattctggtctggctttataacacgccagatgaaataaccattcacttgatggtattttacccgcttcaggtattcccttatcgtctacaaagacaatcatgtccggcgtcatctttgaataagcgatcccactcggcgtaatcaacatgccaccggtatacctggcactcacattacctgatgttccttgattaagacctgacgcattcatttcccgacaagtggaaatgattttttctgctaacttaatccgttccattcctgatccttaatagcaatggccgccgttttaatgctgttccccctggagtgctttactcttcaggtcagcaaacatatccgccagcgctgacttactggcagcacagactccccgctcagtaatgaagccggtaatgtatcgggcaggcgtgacgtcgaaagcgtagttcccacaacgggttccttcaggggcggtattgacccagctcaattctccctgagggtttatcccatagacatgggactgctcttttccgtcacgttgctcaatcggaatgctttttccgtcctcgatagtccagtcaatagtgggagaaggtaacgcgacgtagaagggaacatggttatcatgggccgccagcgccttaagataggtaccaattttattacagacatcccctctggccgtggttcgatcggtcccaacaatgcagagatcaacgtcaccgtgttgcatcaggtggccacccgcgttgtcggcgatcagggtgtgaggaataccgtgtgagcccagttcaaatgccgtgagtccgccctgattacgtggccgcgtttcatccacccagacgtgaacagggattccgttttcatgcgctttgtagatgggagaaagcgcggttccccagtctacagtcgccagccagcctgcgttacaatgtgtcaggatattgaccacactcccggccggttttttctgggctatttcgcggatgacttctgtaccatgtaatccaatttgttcacacaacgcgacatcttcctcggcaatttctgccgccagcgcccaggccacatccttgcgctctgatacacagagatccttcagtgtgtctatcatcctgtcgagggcccatttgagattaattgccgttggtcgggttttgataagaaggtcatagtaacgctgcagacccatgtcactggcatcgtgattcattcccagcgcgatgccataggctgcaacgacaccaataagcggagcgccacgaacccacatctcctgaatagccgtagcggccatttccgcagaggtaagcgccaccacctcgaacttaaaaggcaacttagtctgatcgatgatttctaccgcttttccatccccggaaacccagaccgtacgatagtgtttacctttaatattcataatgacctcttacttaaccttcgcagactggatgacggaatccatatttttaaactggcgggcattgacgataagatcgcgcgccatggtcaatgcacgtcgttcacatcctgcgcgaagctctgtattttcaatctgtttcagctcggcaacgccagcaaaaccaatgatccggcgattcatttccatgccggcattcaccagggaatcttcaagcagcgtggcaaaaaactgatcctgtgcgtcctcaagagcggccctgttctgttgatacatttctgtcggccacgcgtcgccctgtgttttgttgtcccagagctggcggaactcccgggtgaaaacggaccaggtttggacaatctgctgaagcagccattcctgatagtcagcgcgacgttgctcattcgcatcccacccagggcgtgagaagtacgccagcaggaggttgccaatatagttgccgatatcaaacgccattggccccatgaaaccgaactccggatcaatcactttggtatccgtgtcggtcaccatgattgagcctgaatgaaggtcgccatgtaacaatgcctgcgcttctgtcataaatttgtacttataacgcatggcaacctggatcatctctacatcagcccaggccttatggacggcatcgtccagctcaggagaagtccagttattccgttcagcgttgtaatagggctctgtgaagatcagatcttccgtaattttgcacagctcatgattcaacgcgaactcggcagtaagcgcttttttctgttctgctgacatgccaatgtcagacgtattgaagagagtctgtgctaaaaatctgccgatatcttcagctagtttagggaattttttaccgttaatcagttccttacgcagaatcacgtgaggagtcagatactccatggcaaacagcgccatttccgggtcgtaaaaatagacctgcggaatcagtgtgtgacccgcgtacttggcttcctgacataagacgttgtactcaaagcccgcacggctcagagataaaggccatccttcgccccctgcacgaagccagggcagagcttgttttacaatgatggttttatgtgtcccctcaacgataaacaccatgttcaggtttccgtcccccacttctgaaactttccactcttcaggtaaccctcccggttcgcatgaaggggtcagtctggacgagagataacccggcagcgtgtcacatgtcagcggcttgtaacctgatggaattgaatccgtcataacagttctccttgtctacacagaatgataatcaacttgtcatgtgacaactatacattatcaaatgtaaaattatttgtgacacatgtagattttttgaactgtataatattaaaaatgatgtcgtatggagtcatgatctttacaggaatcagcagaggaaaacatctattattaccatgtaattcatgttgttatgtcgcaacaatagtactgcacggggaattattacgggcaaacttaggcgaaaggaagtactgaagtgacagaataaatcacactttttgtacatatgtacttttctattgtcttttgttgtggaaacaaatagtgtttgtcatgccgatgctaatagacagatagattcgagggccaacagccccatcatcatgatggagcaacagaggtgagtctaacgtttccgcacttcttatcgatcggcactaacgatcaatatcgataaactgatctatcaaaacgattatctttcttgcaacctgcctggttatccttctcttacattgctcgcagaaaagcccttttattacggttagttatctagctgagacttgctacgcccattttccatgtaccccaaatcacgaggtcacaaaggcgcggaaagatgaagagatgtgcacgttgcaacaaaaaaagaagcgtccttgaacagaggctctcactcgataaagaattctgcgacgagtgcttattcgatatcgatgaggaaatcagggaaagaaggattatcacgatcagacgcctcaaagatgacaacgaaagaaaatcgtagctcaatatgaaaaatggaatcgatgtcagcgtcattatccctgcttacaacgccgctgaaaccagcgttagtttggttactaaaatcctcagtgaaccccacttggctattgaacttatcattgtcgatgacggttctactgatgaaactggcaacgttcttcgtcaaatccacgatgatcggctcattctcattgagcaggccaatcaaggtgtctatgccgcccgaaatgctgctctagccttgcaccaaggagaataggttatattccttgatgcggacgacgatatagcagatgggttcatagaaaaaagatggcaggcagttagtacgtcgcaagccgacgtcatgatctttaatggctggcattcctgtgctgaccaacatcgaagagcggttcacaaaaagcagccctatggtacgcctctgtcaggttattaatggattagacactgtgttacacaccgcgaatggccgcattatctgtggctgcagatggtcaggccatcctatgtcaggcagcattcactgcgcttccagtccggcaggagccataaagacattttttaaacggttcatcttgcagcgagcaatggttgattctgtacattggatataaaggactatatctatatcaacaataaggcctctatcacacatcggccggattactacgttgttcgtgctataaactatgttgaagtgatcgcgaaaatcatccaagtagcggaacaagaacaaaacaaaaaataaaggtatttttgtaccggcatgcgctggtagaggcacgtcattttttgggactctaccgcaatcgcgttggggataaatcgggcatgaaggactgcttcaaagcgaacatattcgcagcccatttattcagaggtatcagcagttttagcgatgtgtttttctttattaagctgctgggcaagctattctgataagttgtgcgttgctacacgacaccagcgcacagcttaatttcacgctttctgactaaattgttcaggccttttctataggtgcaaacacaactccccgtactttcctcttccaactcaaaatcatcgcaccttgctgacccaagaagggagcataccctgcactagtatccgcacagctaatactctattgataccaacaacgcttcagcacaacaaagtaactcgataatcacaactcaaagtgaagatgccaaaaactcgtttgagagcaataaattcaataacatgaaaaaaatgtattttgcattgaaaatcttacttattgcgcttggctacaattgcatgcttggtaatatagattataaaacaccagactagctgcctggtaagtaatgtaatagcagaggaaatatcacgatggatcttgtagatagtgtcgaagcaggtaagctgacgatcagtgaattgattgatgccctggcgaaagataaaaattactcagcttccaagtgggatcagcgataccgtgaatttacgaccttgctacaacaaacctcaactttttctgaacctgaaacggatggtttagtcaagaggctctggtatgaacgcgataacggtattgccagtattcgccagggcgttccatccttagcagaatatcagcaaagcctgccactgcttagagaactaactgaacgaattcggcaacagccggatgaagaaacttaccaatatgttggcaatgcactacaacaagctaaagaaaacggacttctcaagcgtatgtataggagtttgagaaatcgcgtctttgccgcgttctcgccagaaaactacaccagtactgtggatgagaatgcttttagtaaagcagcagaattcctaaatcagcacttccatctcggtctggcactgaccggaaattggttacagaaaaactatgaattgaaacaagccatacacgcccaatctcctgacacagatccttattacgtgaatatggccatctggcatctctatgaattgctccgtgaacgcgataatgaacaaaagcaggagaaaatagcgagcactacattcataaccagcaatgagcccatcgagaacaagatcatcctacattcaccaactaacgtgatcttctttggcccccctggcactggcaaaaccttcaggttgcagcaaaaaatgaaagagtacacttctcatgctgttccagctgatcgtgatgcctggctggattctcgccttgaatcgttgaattggatgcaggttataacgctggtgctgctcgatcttgggaaacgagccaaagttcgccaaattattgaacatatgtggtttcaacgtaaggcattattaaacggtcgtaatggcaacctatcgaatacagcctgggcagctttgcaatcctatacagttcccgagtcgttaaccgttgattataagaatcggcgtgagcctgccgtatttaacaaaacagataacagcgaatggttgctagttgattcacagctcgagcaagtggaggatttggtagagctctacgccgaacttaaacgaggccctaaatctgccgaagccatccagcgttttgcggtggttacgttccaccaatcttacggctatgaagaatttattgaaggtatacgcgctcgctctgacgagagtggcaatatctcttatcccattgagccgggtatctttatgcgcctttcccaacgtgccaatgccgatccaggacatcgctacgccattttcattgatgagatcaatcgcggtaacatatccaagatctttggtgaactaatctcactcattgaagtagacaagcgtgcaggcatgcccaatgcaatgagcctacaactggcttatagcggtgatcacttcagcgtacccgccaatgtcgatatcatcggagtgaagtggtttactgaatttggccacctgaacagaggtgatatgctcacctcagaacaacacaggtgccataatgaaaaaaagaaatttcagcgcagagtttaaacgcgaatccgctcaactggtcgttgaccagaattacaccgtggcagatgcagccagcgctatggatgtcggcctttccacaatgacgcgatgggtgaaacaattacgtgatgagcggcagggaaaaacaccaaaagcctcccctattaccccggaacaaattgaaatccgtgagctcaggaaaaagctacaacgtattgaaatggaaaatgaaatattaaaaaaggctaccgcgctcttgatgtcagactccctgaacagttctcgataatcgggaaactcagggcgcgttatcctgtggccactctctgccatgtgttcggggtccatcgcagcagctacaaatactggaaaaaccgtcctgaaaagccagacggcagacgggctgtattacgcagccaggtacttgaactgcatggcatcagccacggctctgccggagcaagaagcatcgccacaatggcaacccagagaggctaccagatggggcgctggcttgctggcagactcatgaaagagctggggctggtcagctgtcagcagccgacttaccggtataaacgtggtggtcatgaacatgttgctatccctaactaccttgaacggcagttcgccgtgaccgagccaaatcaggtgtggtgcggtgatgtgacctatatctggacgggtaagcgctgggcgtacctcgccgttgttctcgacctgttcgcaagaaaaccagtgggctgggccatgtcgttctcgccggacagcaggcttaccatgaaagcactggaaatggcatgggaaacccgtggtaagcccgtcggggtgatgttccacagcgatcaaggcagtcattatacgagcaggcagttccggcagttactgtggagataccggatcaggcagagtatgagtcggcgtggaaactgctgggataacagcccaatggagcgcttcttcaggagtctgaagaacgaatgggtgccggcgacgggctatgtaagcttcagcgatgcagctcacgcaataacggactatatcgttggatattacagcgcactaagaccgcacgaatataatggtgggttaccaccaaacgaatcggaaaatcgatactggaaaaaactctaactcggtggccagtttttgttgaccacttcagagccatgaatacagcggaccgttctttagctctgatggacacggctttgcgccgtcgctttgactttgtcgaaatgatgcccgatctctctttactgagtggagctaaggtgaaaggcatagagctcgagtcgttgttagagaaactcaatagccgcatcgaggctctttacgatcgtgaacatacgctggggcatgcgttctttatgccggtaaaaaatgcactcgatgccggtgatgaagaagctgcgtttaaacaattgaagatcgcattccagaaaaagatcattccgcttttacaggaatactttttcgatgactggaacaagatccggttggtgctggcagacaatcaaaagcaagacgacaacctgcaattcgtgattgagaaaaccgacgatctcgatacgctttttggtaacaaccatggtttacgacaccatgatcagcaatcaacagcttacgaactcaaagatttcgatcaagagatctggaatattccacaggcttatcgttcaatttatcagccccagcagactccccttgatgagcaggctgtaaatcatgggtgaagttatctccgtttttgaatatgacctattggggagtgacaaagcggcttcagttggcgcaaaactggtgcctccactggtctttaattatttagaagcgcttagcttggcaagtaatcaagggagccagttcctcaaactcacctctcgctcaggcttcaaattgcttcaggttcaaaactacgcggggatgctttcaacacctcacggtttccagcttgagatactgcccaaggttggtaaaaacctcacagcggctaatgcacgtcaaacattactgacgatgctaagccatttgcctgggtttcgacatattgaaactcagcaagccactcttcaggctcagcgtatgcctttgcttgagatttttattcaccagtttttgcatagcgttagccaattacttaaacaaggtttacgctccgactatgtgagcgagcaaggtaatctggcttttatgaagggcaagctgatgctttctgcacagctgcgacataacgcggtgaatcgccataagttttgtgtcgattatgatgactacatgcctgattgtgcagccaatcggctcttacactccgcgctagataagcttcttagtctaaagctgtcatcagagaatcaacgctggctttacgaactgcgctttgcgtttgacggtattccacttagccgggatattgaacgtgatataaacaacttacgcctcgagcgtggtatggctcattacaacgagccaatggcgtgggcgcaattgatcctgagaggaatgagtccgagtgctttgcagggaaacaccaaagcgatatcacttttgttccctatggaagcggtatttgaatcctttgtggcacagaccctaccctacgaattaccttctcatctcaaagtaataccacaagcggctacttattctcttgtgaagcacgggtctaacgattgctttaaacttcggccggatttgttgattcagtcacgtcgaccggtacaaaccaaattggtgatggacacaaaatggaagctaataaatagcaactcccaaaaaacaacacagtatgggctagcgcaagccgacttctatcaaatgtttgcctacggtcaaaaatacctaaatgggattggcgaaatgtacttaatctatcctgcgcatgatcaatttaaccaaccgatacagcagcattttgctttctctaaaacattaaaactatgggttgttccgtaccagataacagcaaaccgcggggagaggatgatgtgggtgaaggatgtgtccagtatataaatttctagccaagctggcgatgaaccagtcctctaaaaaatgggtataatcatagtttatttactaattaaattaatataaagtaattactttattatatggagaatttatgaaaatgggaaaaattgcagttactcctaataatgataaagcagccagccactctaaagatgaaaatttagccacaaatacaattaagaaaaacgtaaaacctaaatatggcgatgcggcatttttagagtacactcgactaatagttaaccacccgaattattttggaatgccagatccctttggggaaaaaggtgagattcaatgggaagctccatcaaatagggcatcggggaaatttaaacacactcatcaacggcgctatgaatggtggaaaaataaagccagaagtattgggatagaccctgacactgaaaaagcatggattagtaaaacagctaaactaattcatccacttggagttaaaccatgcaagaaatgcggtaaagaaatggaattatcttactcctacccaaatgagcatttcttttctcgggttaggaaacttaattatatagatgagacttttgagctatctcaaaatgaacacatagttgatttgttgactcgtttagatgatagatttggtgaaagaatatatttagatttaccacatttattttctacaaaatccatcacgattccagatatttcaagcaatctcgaagcatggattgagtatctaaaagaacaatacatacctcaagaatcacgtatgcttagccctggagccatggcaaatcctccagatcgttttgatggatttcattcatttaaccgctgttgtcgctctattgctgataaaggaaggaccaaagaaaatcttaaatcttatgttactgacagaagagttttcgaatattgggtggatggtgattgggtagctgcagacaggctaatgggccaagttagaacaaataatatatttattaacgaggaatgtttgaatgccggaaatggtggtttacatccaactccttgccaagcagatcacattggcccaatctcactagggttttcccatcgcccacaatttcaactactttgcaaatcatgtaatagtgccaaaaacaatcgtatgtatttaagtgatataatctctttattagaagctgagaatgaaggtcatacggttatttcatggttcgcagaagaagtatggaatcgactaaaacactctgtagatgatagtgaaaaagccttaagactaagtaaaatactacgtgataatagacatacatatatgaatcttcttaaaaaaataatggatgaaggttattatactttccttgcaagtcttttacatcttgaggtagccaattataacccaatatttgagggattatgcatttcaaatcatttaactcattataaatcattaaaaaaaataaaacgtgaatcaaaatatgctgctgtgcaaaaaacaagacgaatcagaatagcatttacttcattgaatgattatcatagaaaagaaaatcggaacgcatttattgtatcaaatgaattatctgagaagtttttctctgaagctatggataatttaaaatcattaagtgaaattacatcttgcttagatgaaaaaatatccggaataatatctgagaattcagattcaaaaaatgaatttcgaacaatcattacagatctacgagaaatagtgacaaacaataaagaaaaattcaacttgatattaaaatatctaatatcagggatgagcgaaataggaaaagaactggaatcatattgggaaaatgatcgttatgttcgctcaatcccagaagaatttatagagtaagacatagccctcttataaagagggctttatattcctttcataatattctgaaggagtaatattacctctcatgaataattgatagtcattttcggggtgatggatataatatttaccacttccatcttcaccatgttgcaaaggaggcagatcagataatgcatcctttacagatacccaagattccttatcttctgttaatttttgtggaggttcaattgaaaataaagggtcgtttgaaccaaccaatataaccctttttcggcgctgagggattgcataatgttcagagtttaatatccatccattcatagttttcatggttgatgagaattcttctttgactctttcaaagaccttacctttttccatattcaacaaaccagcaacattttcaaaaataaaaccgtttggttttatctcatttaagagagatttataatgcataaaaagtgaatttcttggatcatccattgttctggcatttcctgccgtagaaaatccctggcatgggggtccaccaagtatccataattgtttatcaaaatataatttcttaaatcctgatattttatctgctatttttgaaaaagtttcattatcagaaatgctgccacataaaacttctttgtgaacattgtttgaatatgtttgtagatatttttcttcaatatcattcgccaataatggagtccatccagcccatttgaatcctagtcccagccctccagctccggaaaataaatcgatataataaccagtattacctatcgccttctctatttctttcgcaatcagaaaagctaaaaatgggggcactgcattaccgatttgggtattaattgctgtttgacctccgaagaaaataaaatcatccgggaacgattgtagtcttgcagcttctctctgggatagaacacgatcttgctcatagtgaatatggcaaccattcccaggtcggttaaaatatgtattgatagtatatgcaggcatatctggaagtaatctaccgtagtatgttgaacggcttccttttccttgtgcataactatccctaatttgctctattcttttagacggtacatctaaaggaatatttttccagttgccacctggcggtactgagttaacaatcatcatatccaattcacttagctttgctgccttgtgattgggaatcataaatgtttcacttttagtcataatgttgaaaaatcctcaataaactttctttttcagctaactcaatcttatcaaatgaagacagaagcttattaaattcattcaaatccaatttgtaaatatttttggcaacataagcctcaattttcaactcagcatcacaacatccctctatgcaagaaatcacaagttgttttaattcagaatgttgtaataatattttttcagacggtattgcagtttttcgtaaggctgacaatgatacatgaccagtagctaaaaagcttcttaattgaaattcaaaacaaagggagtttataataccaagcaaactaaagagcgaatcttgcgaaccacttttataatagaccacccctaatgaattccctgccaaagagttaggaggtattatcgttgcaatcattcgccttttttgactcgggcgtgaaatgtcacgccatgcaatccttacgaaattagaattggatagaaccttatcaatttttttcgttattcttaagctcttctcattatgaaaattatacctcccaatcatttttcctttaatgaataataatccgccgccacttttttgtgtccagtcactactaccagtttcatctatttctcttcctgcccatatctctccatttttttccagactaccccatgttgggtatccctcttgcagctttcttaacaaatgaacggcatgaacaccttgagataccggaatgctaagatattgagaatctatactagacaaatcaaaaaaacctagtgatttaatatttaagtttttatcatacacactaagttgaatattatcattaagggattcacctttattaaaaataaaagaacatgaagaaacatcagcaccgccgaataatttagcctcagctggataataatttatgcaatcaatcctccctgaattaaaaaacttttcacgtaatatgtacgattgttcatctgcgaaaaaagatgcaggcataactatagctaccaatccatttttattacatatttctaagctaagttctgcaccaacacgtgaaagattagtcccccacccagcaaatttacgcttcggctgagaatatggcaatactcttgacaaataatcatcaaactcacgaagagagtctatatacatcgatttcatagatggttcaaaaaaatcgagctctctagaatctggttttatattctcccaaggcggattggttataacacaatcaaaataatcaacatattttttaaattcataaaaaacatcactattttttatagtaatgttaatatttgcacctgctaacttaagttcagacaacgcatttttagcataagtgaggcctgtattttctatatcgaacagataaacattccactctacatctggaaaaccatttatcatccattgtttaataagcaatgtaataagtcgaccatcccctgaaaatggatctgcgacattataactttttttatcacaggaatttatcaatggtaataacttctctatcatcaaaagagctatttttggatctgtatagtatttacctgtcgcttttttagtgaattttgttgtctcgtccaaggacagtgaattaattaaatggatatgtttcatgtaaaatatctcttccattaataatatggattatatcatttaacttgtgaacactcaacaataactgtacataaaaacagtcattaaagatttcccctagagtgagcatcgctataaaaatttaaattaattttatcctgctccgaaagaaacagttatcatttattccataaagaataacttgctttataatcactttaaatatcgatatcaattttaatactatggttacttaccatatcaataaatagcttaacccgttatctcgataccccttaagaaccccttccgcaactgcaacataatctacgctcatccacatgcctggtgcgtattaccgtgaaggagatcggtgagttattgagtgatctcctttcatgaaaatacgcacctggctttaactgttcctgatataagttgacagttttctgtccgtaaaacggttgatgaacttcatcgggcgttttgtatttcaatgccaaatgtgaccgctcatggttataaattgccacgaattcttttaccatttaccggccctacgtcagctctgcaggacgcgagagtaaaaactcattttcaggattccgtttatccactcagcctgcgcattctggtggcagttataaccattagtcattgaacaggttattgataaataattaaaaaactcagttttctggctcgcctgctcaagctgttcttcaagttccctgattctttgctcgggtgtcagcgggacagtcgccagagccacaggcagtctcctctttacctggtcaggaagtccggggctccagtcaagccggccatatttacgcaaccagacaagaacggtggagcgcccctgaatgccataactgcagccggcctgtttataagtcatctcgcctttttcaaccttctcaacaacggctattttaaaggatagaggataatcacgttgagtgcgtttgaacccagacatcatcacgttctccgggtttaagtcaggaacgtgtcatagctattcaggacgggtcaccgacacaaaaaaagtcgcccttgagcgactcgatttgcatacggtatggtgcgaaggccggactcaaacatgcgatttaacctcatgatttaaaattgttaataataaacaacaccatcctataccaacacagataccaacacgaaaaatcactggttttcggcatcgaaccaggacaatcaggtcctgattgagataccgagctctgttactcgtcatcttcctcgacaggctccattgcatcaagtggtactcgcaccatcgcgatagaaccaatccggataaaagcatcttccccatctatatcggttaactgatatcgcttacttgatgccggataattgtgtcgattggcaacagtgtactctttcgtacagccagaatgtggcagactgaggtggaatagataacgtccgtatgcccgctgaccacctccgggcgggagagtgtggtatctgacatcatcatttttcctttctgtttataaatgaaaatgccagccgtgttcaggctgacgtcagggaagtgaaatcgggtgagtgatcttcactggttctggtacaaaagttactgttggcgcagggtacggataccctccctggcctgtgcgatacagggcaacagtgctgccgaatctgttttatcctcatcgttgtcgaagataattcccgattcgcagtcgatattgtcctgcagccacgtaatcagaatatccagcgctgtttccgtggttaatgatttcatgttgtgaatttccggattaccagtcgaaagtgggtaaacccggcagatatccggcactggcatccagatgaatgagactgacaccataacaccggatgagtgtgacgaccagacgacggaacgtttttgacagccccaggcgcttaagccgcagaaccgggtatgaccacgtatcggtacgtaacagataaccggtaccggtaaaatgaatccattctgattcaccgaagtcactggtctggtgtgacagcgagtacagccaggcgttgtccgtttccgtgatatgtgcggtactgcagcgtatgccggtaagggcaacaaatggtggcgtgcagtctgctgaggtccggtcagattcatcaacaacacgaagggagtagccgttatcgcagaccatgttaatcagttcagcgagattaacaccatcaatgtcaacgacaatgcgccccatgttcagcgcctgcacgttaacgctgtcggcttccagcgtcagggccagtttcatcgtttcgcctccggatgcttccccagggtaatgttatttaccgttctgtaattgtcgcggatcatcaggcctgttgcccggcgagcccggaggatatcgatgctgtttattaactgagagtgggtacaggcgctgaatcccggcaggtcggtacgtaccagtgcgtatttttccacgagaaagttcactgcatcacacagtgaaatgcctgcctcaatatgctgctcaatcacacgttcatcagcgaacggtgtgtcattcagcgtaaggccgtagtgctggtccagcagtcgggtgagcagtgtctgccagatggtgactggagacgggcagcacgatacctcccgtacatgcgtgtcgggtaatgttttcatactgaagattttcctgatatgcagagataaaaaatgggacagtggcgtggtgaaaacaccaggccggagcagaaggttattctggtggtttactttttcgtttcaggtgtcggataaacagccagataaacgtaaccacaggagccgagggtgtcggcttcacaggtcagccccttcgcatacagtgtcacggtatgctgatggcggggattcagttcaccactggtgagcattaatttcagttgtttcatcagcagcggaaaggcctggtccagagggtacgcatccgcatctctgaaccggcctctgataccggcacggtcggcaaggtaatgcaaccggttaccctcctgcaccagacgggcgccgaaacagggcgtcactgtgcagggtagtccccaccagggatggtcgtcattgtcatcgggatgcgttgtcccggaaagtgtgtctgacacgataaaatcctcacagaaaatcggtgaatgatagtttaacgatgacgggtcagccggcgcgcagaccggcttcggtaaaggtgtattcgttgatgagcaggacctcatccacagcggcgtctgagctctgccagtcgtactcgttttccgggtgacggaacatcagttcagggtgacgctcatcagccggacatacggaccaaaactgtccttacggcgttctgcaaacacggccagcacaccgggaatatcctgcacttcacgaccggtatacgcttcagcactgccgtgccagcggtatttgccggtacagaacggaaaaagacgggatgccggatgctgacggtgaatacgcatggcttcgccacgggtgatgattttcatagtgggatacctcnnnnnnnnnnnnnnnnnnnnnnnnnnnnnnnnnnnnnnnnnnnnnnnnnnnnnnnnnnnnnnnnnnnnnnnnnnnnnnnnnnnnnnnnnnnnnnnnnnnnnnnnnnnnnnnnnnnnnnnnnnnnnnnnnnnnnnnnnnnnnnnnnnnnnnnnnnnnnnnnnnnnnnnnnnnnnnnnnnnnnnnnnnnnnnnnnnnnnnnnnnnnnnnnnnnnnnnnnnnnnnnnnnnnnnnnnnnnnnnnnnnnnnnnnnnnnnnnnnnnnnnnnnnnnnnnnnnnnnnnnnnnnnnnnnnnnnnnnnnnnnnnnnnnnnnnnnnnnnnnnnnnnnnnnnnnnnnnnnnnnnnnnnnnnnnnnnnnnnnnnnnnnnnnnnnnnnnnnnnnnnnnnnnnnnnnnnnnnnnnnnnnnnnnnnnnnnnnnnnnnnnnnnnnnnnnnnnnnnnnnnnnnnnnnnnnnnnnnnnnnnnnnnnnnnnnnnnnnnnnnnnnnnnnnnnnnnnnnnnnnnnnnnnnnnnnnnnnnnnnnnnnnnnnnnnnnnnnnnnnnnnnnnnnnnnnnnnnnnnnnnnnnnnnnnnnnnnnnnnnnnnnnnnnnnnnnnnnnnnnnnnnnnnnnnnnnnnnnnnnnnnnnnnnnnnnnnnnnnnnnnnnnnnnnnnnnnnnnnnnnnnnnnnnnnnnnnnnnnnnnnnnnnnnnnnnnnnnnnnnnnnnnnnnnnnnnnnnnnnnnnnnnnnnnnnnnnnnnnnnnnnnnnnnnnnnnnnnnnnnnnnnnnnnnnnnnnnnnnnnnnnnnnnnnnnnnnnnnnnnnnnnnnnnnnnnnnnnnnnnnnnnnnnnnnnnnnnnnnnnnnnnnnnnnnnnnnnnnnnnnnnnnnnnnnnnnnnnnnnnnnnnnnnnnnnnnnnnnnnnnnnnnnnnnnnnnnnnnnnnnnnnnnnnnnnnnnnnnnnnnnnnnnnnnnnnnnnnnnnnnnnnnnnnnnnnnnnnnnnnnnnnnnnnnnnnnnnnnnnnnnnnnnnnnnnnnnnnnnnnnnnnnnnnnnnnnnnnnnnnnnnnnnnnnnnnnnnnnnnnnnnnnnnnnnnnnnnnnnnnnnnnnnnnnnnnnnnnnnnnnnnnnnnnnnnnnnnnnnnnnnnnnnnnnnnnnnnnnnnnnnnnnnnnnnnnnnnnnnnnnnnnnnnnnnnnnnnnnnnnnnnnnnnnnnnnnnnnnnnnnnnnnnnnnnnnnnnnnnnnnnnnnnnnnnnnnnnnnnnnnnnnnnnnnnnnnnnnnnnnnnnnnnnnnnnnnnnnnnnnnnnnnnnnnnnnnnnnnnnnnnnnnnnnnnnnnnnnnnnnnnnnnnnnnnnnnnnnnnnnnnnnnnnnnnnnnnnnnnnnnnnnnnnnnnnnnnnnnnnnnnnnnnnnnnnnnnnnnnnnnnnnnnnnnnnnnnnnnnnnnnnnnnnnnnnnnnnnnnnnnnnnnnnnnnnnnnnnnnnnnnnnnnnnnnnnnnnnnnnnnnnnnnnnnnnnnnnnnnnnnnnnnnnnnnnnnnnnnnnnnnnnnnnnnnnnnnnnnnnnnnnnnnnnnnnnnnnnnnnnnnnnnnnnnnnnnnnnnnnnnnnnnnnnnnnnnnnnnnnnnnnnnnnnnnnnnnnnnnnnnnnnnnnnnnnnnnnnnnnnnnnnnnnnnnnnnnnnnnnnnnnnnnnnnnnnnnnnnnnnnnnnnnnnnnnnnnnnnnnnnnnnnnnnnnnnnnnnnnnnnnnnnnnnnnnnnnnnnnnnnnnnnnnnnnnnnnnnnnnnnnnnnnnnnnnnnnnnnnnnnnnnnnnnnnnnnnnnnnnnnnnnnnnnnnnnnnnnnnnnnnnnnnnnnnnnnnnnnnnnnnnnnnnnnnnnnnnnnnnnnnnnnnnnnnnnnnnnnnnnnnnnnnnnnnnnnnnnnnnnnnnnnnnnnnnnnnnnnnnnnnnnnnnnnnnnnnnnnnnnnnnnnnnnnnnnnnnnnnnnnnnnnnnnnnnnnnnnnnnnnnnnnnnnnnnnnnnnnnnnnnnnnnnnnnnnnnnnnnnnnnnnnnnnnnnnnnnnnnnnnnnnnnnnnnnnnnnnnnnnnnnnnnnnnnnnnnnnnnnnnnnnnnnnnnnnnnnnnnnnnnnnnnnnnnnnnnnnnnnnnnnnnnnnnnnnnnnnnnnnnnnnnnnnnnnnnnnnnnnnnnnnnnnnnnnnnnnnnnnnnnnnnnnnnnnnnnnnnnnnnnnnnnnnnnnnnnnnnnnnnnnnnnnnnnnnnnnnnnnnnnnnnnnnnnnnnnnnnnnnnnnnnnnnnnnnnnnnnnnnnnnnnnnnnnnnnnnnnnnnnnnnnnnnnnnnnnnnnnnnnnnnnnnnnnnnnnnnnnnnnnnnnnnnnnnnnnnnnnnnnnnnnnnnnnnnnnnnnnnnnnnnnnnnnnnnnnnnnnnnnnnnnnnnnnnnnnnnnnnnnnnnnnnnnnnnnnnnnnnnnnnnnnnnnnnnnnnnnnnnnnnnnnnnnnnnnnnnnnnnnnnnnnnnnnnnnnnnnnnnnnnnnnnnnnnnnnnnnnnnnnnnnnnnnnnnnnnnnnnnnnnnnnnnnnnnnnnnnnnnnnnnnnnnnnnnnnnnnnnnnnnnnnnnnnnnnnnnnnnnnnnnnnnnnnnnnnnnnnnnnnnnnnnnnnnnnnnnnnnnnnnnnnnnnnnnnnnnnnnnnnnnnnnnnnnnnnnnnnnnnnnnnnnnnnnnnnnnnnnnnnnnnnnnnnnnnnnnnnnnnnnnnnnnnnnnnnnnnnnnnnnnnnnnnnnnnnnnnnnnnnnnnnnnnnnnnnnnnnnnnnnnnnnnnnnnnnnnnnnnnnnnnnnnnnnnnnnnnnnnnnnnnnnnnnnnnnnnnnnnnnnnnnnnnnnnnnnnnnnnnnnnnnnnnnnnnnnnnnnnnnnnnnnnnnnnnnnnnnnnnnnnnnnnnnnnnnnnnnnnnnnnnnnnnnnnnnnnnnnnnnnnnnnnnnnnnnnnnnnnnnnnnnnnnnnnnnnnnnnnnnnnnnnnnnnnnnnnnnnnnnnnnnnnnnnnnnnnnnnnnnnnnnnnnnnnnnnnnnnnnnnnnnnnnnnnnnnnnnnnnnnnnnnnnnnnnnnnnnnnnnnnnnnnnnnnnnnnnnnnnnnnnnnnnnnnnnnnnnnnnnnnnnnnnnnnnnnnnnnnnnnnnnnnnnnnnnnnnnnnnnnnnnnnnnnnnnnnnnnnnnnnnnnnnnnnnnnnnnnnnnnnnnnnnnnnnnnnnnnnnnnnnnnnnnnnnnnnnnnnnnnnnnnnnnnnnnnnnnnnnnnnnnnnnnnnnnnnnnnnnnnnnnnnnnnnnnnnnnnnnnnnnnnnnnnnnnnnnnnnnnnnnnnnnnnnnnnnnnnnnnnnnnnnnnnnnnnnnnnnnnnnnnnnnnnnnnnnnnnnnnnnnnnnnnnnnnnnnnnnnnnnnnnnnnnnnnnnnnnnnnnnnnnnnnnnnnnnnnnnnnnnnnnnnnnnnnnnnnnnnnnnnnnnnnnnnnnnnnnnnnnnnnnnnnnnnnnnnnnnnnnnnnnnnnnnnnnnnnnnnnnnnnnnnnnnnnnnnnnnnnnnnnnnnnnnnnnnnnnnnnnnnnnnnnnnnnnnnnnnnnnnnnnnnnnnnnnnnnnnnnnnnnnnnnnnnnnnnnnnnnnnnnnnnnnnnnnnnnnnnnnnnnnnnnnnnnnnnnnnnnnnnnnnnnnnnnnnnnnnnnnnnnnnnnnnnnnnnnnnnnnnnnnnnnnnnnnnnnnnnnnnnnnnnnnnnnnnnnnnnnnnnnnnnnnnnnnnnnnnnnnnnnnnnnnnnnnnnnnnnnnnnnnnnnnnnnnnnnnnnnnnnnnnnnnnnnnnnnnnnnnnnnnnnnnnnnnnnnnnnnnnnnnnnnnnnnnnnnnnnnnnnnnnnnnnnnnnnnnnnnnnnnnnnnnnnnnnnnnnnnnnnnnnnnnnnnnnnnnnnnnnnnnnnnnnnnnnnnnnnnnnnnnnnnnnnnnnnnnnnnnnnnnnnnnnnnnnnnnnnnnnnnnnnnnnnnnnnnnnnnnnnnnnnnnnnnnnnnnnnnnnnnnnnnnnnnnnnnnnnnnncctcacaggccaccttcacaggcttacagaacgctcccctacccaacaacacatagtgtcgctgccgcagcttcggtgcatggtttagccccgttacatcttccgcgcaggccgactcgaccagtgagctattacgctttctttaaatgatggctgcttctaagccaacatcctggctgtctgggccttcccacatcgtttcccacttaaccatgactttgggaccttagctggcggtctgggttgtttccctcttcacgacggacgttagcacccgccgtgtgtctcccgtgataacattctccggtattcgcagtttgcatcgggttggtaagtcgggatgacccccttgccgaaacagtgctctacccccggagatgaattcacgaggcgctacctaaatagctttcggggagaaccagctatctcccggtttgattggcctttcacccccagccacaagtcatccgctaatttttcaacattagtcggttcggtcctccagttagtgttacccaaccttcaacctgcccatggctagatcaccgggtttcgggtctataccctgcaacttaacgcccagttaagactcggtttcccttcggctcccctattcggttaaccttgctacagaatataagtcgctgacccattatacaaaaggtacgcagtcaccccattaagaggctcccactgcttgtacgtacacggtttcaggttctttttcactcccctcgccggggttcttttcgcctttccctcacggtactggttcactatcggtcagtcaggagtatttagccttggaggatggtccccccatattcagacaggataccacgtgtcccgccctactcatcgagctcacaatatgtgcatttttgtgtacggggctgtcaccctgtatcgcacgcctttccagacgcttccactaacacacacactgattcaggctctgggctcctccccgttcgctcgccgctactgggggaatctcggttgatttcttttcctcggggtacttagatgtttcagttcccccggttcgcctcattaacctatggattcagttaatgatannnnnnnnnnnnnnnnnnnnnnnnnnnnnnnnnnnnnnnnnnnnnnnnnnnnnnnnnnnnnnnnnnnnnnnnnnnnnnnnnnnnnnnnnnnnnnnnnnnnnnnnnnnnnnnnnnnnnnnnnnnnnnnnnnnnnnnnnnnnnnnnnnnnnnnnnnnnnnnnnnnnnnnnnnnnnnnnnnnnnnnnnnnnnnnnnnnnnnnnnnnnnnnnnnnnnnnnnnnnnnnnnnnnnnnnnnnnnnnnnnnnnnnnnnnnnnnnnnnnnnnnnnnnnnnnnnnnnnnnnnnnnnnnnnnnnnnnnnnnnnnnnnnnnnnnnnnnnnnnnnnnnnnnnnnnnnnnnnnnnnnnnnnnnnnnnnnnnnnnnnnnnnnnnnnnnnnnnnnnnnnnnnnnnnnnnnnnnnnnnnnnnnnnnnnnnnnnnnnnnnnnnnnnnnnnnnnnnnnnnnnnnnnnnnnnnnnnnnnnnnnnnnnnnnnnnnnnnnnnnnnnnnnnnnnnnnnnnnnnnnnnnnnnnnnnnnnnnnnnnnnnnnnnnnnnnnnnnnnnnnnnnnnnnnnnnnnnnnnnnnnnnnnnnnnnnnnnnnnnnnnnnnnnnnnnnnnnnnnnnnnnnnnnnnnnnnnnnnnnnnnnnnnnnnnnnnnnnnnnnnnnnnnnnnnnnnnnnnnnnnnnnnnnnnnnnnnnnnnnnnnnnnnnnnnnnnnnnnnnnnnnnnnnnnnnnnnnnnnnnnnnnnnnnnnnnnnnnnnnnnnnnnnnnnnnnnnnnnnnnnnnnnnnnnnnnnnnnnnnnnnnnnnnnnnnnnnnnnnnnnnnnnnnnnnnnnnnnnnnnnnnnnnnnnnnnnnnnnnnnnnnnnnnnnnnnnnnnnnnnnnnnnnnnnnnnnnnnnnnnnnnnnnnnnnnnnnnnnnnnnnnnnnnnnnnnnnnnnnnnnnnnnnnnnnnnnnnnnnnnnnnnnnnnnnnnnnnnnnnnnnnnnnnnnnnnnnnnnnnnnnnnnnnnnnnnnnnnnnnnnnnnnnnnnnnnnnnnnnnnnnnnnnnnnnnnnnnnnnnnnnnnnnnnnnnnnnnnnnnnnnnnnnnnnnnnnnnnnnnnnnnnnnnnnnnnnnnnnnnnnnnnnnnnnnnnnnnnnnnnnnnnnnnnnnnnnnnnnnnnnnnnnnnnnnnnnnnnnnnnnnnnnnnnnnnnnnnnnnnnnnnnnnnnnnnnnnnnnnnnnnnnnnnnnnnnnnnnnnnnnnnnnnnnnnnnnnnnnnnnnnnnnnnnnnnnnnnnnnnnnnnnnnnnnnnnnnnnnnnnnnnnnnnnnnnnnnnnnnnnnnnnnnnnnnnnnnnnnnnnnnnnnnnnnnnnnnnnnnnnnnnnnnnnnnnnnnnnnnnnnnnnnnnnnnnnnnnnnnnnnnnnnnnnnnnnnnnnnnnnnnnnnnnnntcttccgcacgcacaatcacatggctggtccacggcggcagctgcatcatgcgtcgttcagccagtgcctgttcggcaaaggcgtcgtagcctttatagagcaatgtttgcaacagaggatgttccggatggtgcgtttgcagcaccacttcgccctgtttacccgcacgcccggcacgaccggcgacctgggtgtaaagctgggcgaaacgttctgccgagcgaaaatcggcagaaaacagcgcgccgtccacatccagtaacgccaccagcgtcacatccggaaagtggtgacctttcgccagcatttgcgtgccaatcaagatcctcgcgccgccgcgatgcacttccgccagttgctgttccagcgcccctttgcggctggtggtatcgcggtcgatacgagaaatggggacaccagggaacaacggcgcgagcgtctgttcaagctgttcggtgcccagccccacgggtaccaggtgcgtggaaccgcaagaagggcactggcgcggcaccggacgctgactgtcgcaatggtggcagcgcaaatgctgttgcgcctgatgcagcgtgtagtagtgatcgcaacgtgggcattcggctatccagccgcagtcgtggcacagcagcgcaggcgcaaaaccccgacgattaagaaagaggataacctgattgttggcctgtaaatgctggcgcatacgggtgattaacgccggagccagacctgcctgcaccttctgaccttttaaatccagcacatgttgaattgccgggcgcgcattgcccgcccgacgggtcaggcgcagcaggcggtattttttctgctgcacgttgcataacgtttccagtgcgggcgttgcggagccaagaataattgggatttgctcgctatgcgcgcgatacaccgccaggtcgcgggcatgatagcgccagccttcctgctgcttgtaggagctgtcgtgctcttcatcaataacaatcacgccgagatttttaaacggcgtaaacagcgcggagcgggtgccgatgacaatcgccgcctcgccatttttcgctttcaaccacgccgaaagacgctcgctgtcgttcaggccggaatgcagaacttccaccggggcattaaaacgttcacgaaaacgggcgatagtttgcggtgtcaggccgatttccggcaccatcaccagcgcctgtttgccctgagcgagcacgttttccagtacactgagataaacctccgttttaccggaaccggtaacgcccgccagcagccaggcagaaaaagtatctgccgcgctatgaattgcgccaacggcggtggcctgttcggtattcaaccgcaaccgctcaccagaaacggcatagttcgttcgccagtcgctaaactctggtgtttcacttgctaaatcacacagaccttttttgcgcagtgcctgcaacgcggcatcattaaattcaagttccgcgacctgatcacgccagattttgccttgccgtaacgctgccagcgcctgttgttgctttggcgaacgtttcaggctgttcagatccaccgcctgaccttgttcagtggcaaaccagtaccacatcggcgcgttcgccgcaggccgcccctggcgcagtaaaatcggcaaggcatgaannnnnnnnnnnnnnnnnnnnnnnnnnnnnnnnnnnnnnnnnnnnnnnnnnnnnnnnnnnnnnnnnnnnnnnnnnnnnnnnnnnnnnnnnnnnnnnnnnnnnnnnnnnnnnnnnnnnnnnnnnnnnnnnnnnnnnnnnnnnnnnnnnnnnnnnnnnnnnnnnnnnnnnnnnnnnnnnnnnnnnnnnnnnnnnnnnnnnnnnnnnnnnnnnnnnnnnnnnnnnnnnnnnnnnnnnnnnnnnnnnnnnnnnnnnnnnnnnnnnnnnnnnnnnnnnnnnnnnnnnnnnnnnnnnnnnnnnnnnnnnnnnnnnnnnnnnnnnnnnnnnnnnnnnnnnnnnnnnnnnnnnnnnnnnnnnnnnnnnnnnnnnnnnnnnnnnnnnnnnnnnnnnnnnnnnnnnnnnnnnnnnnnnnnnnnnnnnnnnnnnnnnnnnnnnnnnnnnnnnnnnnnnnnnnnnnnnnnnnnnnnnnnnnnnnnnnnnnnnnnnnnnnnnnnnnnnnnnnnnnnnnnnnnnnnnnnnnnnnnnnnnnnnnnnnnnnnnnnnnnnnnnnnnnnnnnnnnnnnnnnnnnnnnnnnnnnnnnnnnnnnnnnnnnnnnnnnnnnnnnnnnnnnnnnnnnnnnnnnnnnnnnnnnnnnnnnnnnnnnnnnnnnnnnnnnnnnnnnnnnnnnnnnnnnnnnnnnnnnnnnnnnnnnnnnnnnnnnnnnnnnnnnnnnnnnnnnnnnnnnnnnnnnnnnnnnnnnnnnnnnnnnnnnnnnnnnnnnnnnnnnnnnnnnnnnnnnnnnnnnnnnnnnnnnnnnnnnnnnnnnnnnnnnnnnnnnnnnnnnnnnnnnnnnnnnnnnnnnnnnnnnnnnnnnnnnnnnnnnnnnnnnnnnnnnnnnnnnnnnnnnnnnnnnnnnnnnnnnnnnnnnnnnnnnnnnnnnnnnnnnnnnnnnnnnnnnnnnnnnnnnnnnnnnnnnnnnnnnnnnnnnnnnnnnnnnnnnnnnnnnnnnnnnnnnnnnnnnnnnnnnnnnnnnnnnnnnnnnnnnnnnnnnnnnnnnnnnnnnnnnnnnnnnnnnnnnnnnnnnnnnnnnnnnnnnnnnnnnnnnnnnnnnnnnnnnnnnnnnnnnnnnnnnnnnnnnnnnnnnnnnnnnnnnnnnnnnnnnnnnnnnnnnnnnnnnnnnnnnnnnnnnnnnnnnnnnnnnnnnnnnnnnnnnnnnnnnnnnnnnnnnnnnnnnnnnnnnnnnnnnnnnnnnnnnnnnnnnnnnnnnnnnnnnnnnnnnnnnnnnnnnnnnnnnnnnnnnnnnnnnnnnnnnnnnnnnnnnnnnnnnnnnnnnnnnnnnnnnnnnnnnnnnnnnnnnnnnnnnnnnnnnnnnnnnnnnnnnnnnnnnnnnnnnnnnnnnnnnnnnnnnnnnnnnnnnnnnnnnnnnnnnnnnnnnnnnnnnnnnnnnnnnnnnnnnnnnnnnnnnnnnnnnnnnnnnnnnnnnnnnnnnnnnnnnnnnnnnnnnnnnnnnnnnnnnnnnnnnnnnnnnnnnnnnnnnnnnnnnnnnnnnnnnnnnnnnnnnnnnnnnnnnnnnnnnnnnnnnnnnnnnnnnnnnnnnnnnnnnnnnnnnnnnnnnnnnnnnnnnnnnnnnnnnnnnnnnnnnnnnnnnnnnnnnnnnnnnnnnnnnnnnnnnnnnnnnnnnnnnnnnnnnnnnnnnnnnnnnnnnnnnnnnnnnnnnnnnnnnnnnnnnnnnnnnnnnnnnnnnnnnnnnnnnnnnnnnnnnnnnnnnnnnnnnnnnnnnnnnnnnnnnnnnnnnnnnnnnnnnnnnnnnnnnnnnnnnnnnnnnnnnnnnnnnnnnnnnnnnnnnnnnnnnnnnnnnnnnnnnnnnnnnnnnnnnnnnnnnnnnnnnnnnnnnnnnnnnnnnnnnnnnnnnnnnnnnnnnnnnnnnnnnnnnnnnnnnnnnnnnnnnnnnnnnnnnnnnnnnnnnnnnnnnnnnnnnnnnnnnnnnnnnnnnnnnnnnnnnnnnnnnnnnnnnnnnnnnnnnnnnnnnnnnnnnnnnnnnnnnnnnnnnnnnnnnnnnnnnnnnnnnnnnnnnnnnnnnnnnnnnnnnnnnnnnnnnnnnnnnnnnnnnnnnnnnnnnnnnnnnnnnnnnnnnnnnnnnnnnnnnnnnnnnnnnnnnnnnnnnnnnnnnnnnnnnnnnnnnnnnnnnnnnnnnnnnnnnnnnnnnnnnnnnnnnnnnnnnnnnnnnnnnnnnnnnnnnnnnnnnnnnnnnnnnnnnnnnnnnnnnnnnnnnnnnnnnnnnnnnnnnnnnnnnnnnnnnnnnnnnnnnnnnnnnnnnnnnnnnnnnnnnnnnnnnnnnnnnnnnnnnnnnnnnnnnnnnnnnnnnnnnnnnnnnnnnnnnnnnnnnnnnnnnnnnnnnnnnnnnnnnnnnnnnnnnnnnnnnnnnnnnnnnnnnnnnnnnnnnnnnnnnnnnnnnnnnnnnnnnnnnnnnnnnnnnnnnnnnnnnnnnnnnnnnnnnnnnnnnnnnnnnnnnnnnnnnnnnnnnnnnnnnnnnnnnnnnnnnnnnnnnnnnnnnnnnnnnnnnnnnnnnnnnnnnnnnnnnnnnnnnnnnnnnnnnnnnnnnnnnnnnnnnnnnnnnnnnnnnnnnnnnnnnnnnnnnnnnnnnnnnnnnnnnnnnnnnnnnnnnnnnnnnnnnnnnnnnnnnnnnnnnnnnnnnnnnnnnnnnnnnnnnnnnnnnnnnnnnnnnnnnnnnnnnnnnnnnnnnnnnnnnnnnnnnnnnnnnnnnnnnnnnnnnnnnnnnnnnnnnnnnnnnnnnnnnnnnnnnnnnnnnnnnnnnnnnnnnnnnnnnnnnnnnnnnnnnnnnnnnnnnnnnnnnnnnnnnnnnnnnnnnnnnnnnnnnnnnnnnnnnnnnnnnnnnnnnnnnnnnnnnnnnnnnnnnnnnnnnnnnnnnnnnnnnnnnnnnnnnnnnnnnnnnnnnnnnnnnnnnnnnnnnnnnnnnnnnnnnnnnnnnnnnnnnnnnnnnnnnnnnnnnnnnnnnnnnnnnnnnnnnnnnnnnnnnnnnnnnnnnnnnnnnnnnnnnnnnnnnnnnnnnnnnnnnnnnnnnnnnnnnnnnnnnnnnnnnnnnnnnnnnnnnnnnnnnnnnnnnnnnnnnnnnnnnnnnnnnnnnnnnnnnnnnnnnnnnnnnnnnnnnnnnnnnnnnnnnnnnnnnnnnnnnnnnnnnnnnnnnnnnnnnnnnnnnnnnnnnnnnnnnnnnnnnnnnnnnnnnnnnnnnnnnnnnnnnnnnnnnnnnnnnnnnnnnnnnnnnnnnnnnnnnnnnnnnnnnnnnnnnnnnnnnnnnnnnnnnnnnnnnnnnnnnnnnnnnnnnnnnnnnnnnnnnnnnnnnnnnnnnnnnnnnnnnnnnnnnnnnnnnnnnnnnnnnnnnnnnnnnnnnnnnnnnnnnnnnnnnnnnnnnnnnnnnnnnnnnnnnnnnnnnnnnnnnnnnnnnnnnnnnnnnnnnnnnnnnnnnnnnnnnnnnnnnnnnnnnnnnnnnnnnnnnnnnnnnnnnnnnnnnnnnnnnnnnnnnnnnnnnnnnnnnnnnnnnnnnnnnnnnnnnnnnnnnnnnnnnnnnnnnnnnnnnnnnnnnnnnnnnnnnnnnnnnnnnnnnnnnnnnnnnnnnnnnnnnnnnnnnnnnnnnnnnnnnnnnnnnnnnnnnnnnnnnnnnnnnnnnnnnnnnnnnnnnnnnnnnnnnnnnnnnnnnnnnnnnnnnnnnnnnnnnnnnnnnnnnnnnnnnnnnnnnnnnnnnnnnnnnnnnnnnnnnnnnnnnnnnnnnnnnnnnnnnnnnnnnnnnnnnnnnnnnnnnnnnnnnnnnnnnnnnnnnnnnnnnnnnnnnnnnnnnnnnnnnnnnnnnnnnnnnnnnnnnnnnnnnnnnnnnnnnnnnnnnnnnnnnnnnnnnnnnnnnnnnnnnnnnnnnnnnnnnnnnnnnnnnnnnnnnnnnnnnnnnnnnnnnnnnnnnnnnnnnnnnnnnnnnnnnnnnnnnnnnnnnnnnnnnnnnnnnnnnnnnnnnnnnnnnnnnnnnnnnnnnnnnnnnnnnnnnnnnnnnnnnnnnnnnnnnnnnnnnnnnnnnnnnnnnnnnnnnnnnnnnnnnnnnnnnnnnnnnnnnnnnnnnnnnnnnnnnnnnnnnnnnnnnnnnnnnnnnnnnnnnnnnnnnnnnnnnnnnnnnnnnnnnnnnnnnnnnnnnnnnnnnnnnnnnnnnnnnnnnnnnnnnnnnnnnnnnnnnnnnnnnnnnnnnnnnnnnnnnnnnnnnnnnnnnnnnnnnnnnnnnnnnnnnnnnnnnnnnnnnnnnnnnnnnnnnnnnnnnnnnnnnnnnnnnnnnnnnnnnnnnnnnnnnnnnnnnnnnnnnnnnnnnnnnnnnnnnnnnnnnnnnnnnnnnnnnnnnnnnnnnnnnnnnnnnnnnnnnnnnnnnnnnnnnnnnnnnnnnnnnnnnnnnnnnnnnnnnnnnnnnnnnnnnnnnnnnnnnnnnnnnnnnnnnnnnnnnnnnnnnnnnnnnnnnnnnnnnnnnnnnnnnnnnnnnnnnnnnnnnnnnnnnnnnnnnnnnnnnnnnnnnnnnnnnnnnnnnnnnnnnnnnnnnnnnnnnnnnnnnnnnnnnnnnnnnnnnnnnnnnnnnnnnnnnnnnnnnnnnnnnnnnnnnnnnnnnnnnnnnnnnnnnnnnnnnnnnnnnnnnnnnnnnnnnnnnnnnnnnnnnnnnnnnnnnnnnnnnnnnnnnnnnnnnnnnnnnnnnnnnnnnnnnnnnnnnnnnnnnnnnnnnnnnnnnnnnnnnnnnnnnnnnnnnnnnnnnnnnnnnnnnnnnnnnnnnnnnnnnnnnnnnnnnnnnnnnnnnnnnnnnnnnnnnnnnnnnnnnnnnnnnnnnnnnnnnnnnnnnnnnnnnnnnnnnnnnnnnnnnnnnnnnnnnnnnnnnnnnnnnnnnnnnnnnnnnnnnnnnnnnnnnnnnnnnnnnnnnnnnnnnnnnnnnnnnnnnnnnnnnnnnnnnnnnnnnnnnnnnnnnnnnnnnnnnnnnnnnnnnnnnnnnnnnnnnnnnnnnnnnnnnnnnnnnnnnnnnnnnnnnnnnnnnnnnnnnnnnnnnnnnnnnnnnnnnnnnnnnnnnnnnnnnnnnnnnnnnnnnnnnnnnnnnnnnnnnnnnnnnnnnnnnnnnnnnnnnnnnnnnnnnnnnnnnnnnnnnnnnnnnnnnnnnnnnnnnnnnnnnnnnnnnnnnnnnnnnnnnnnnnnnnnnnnnnnnnnnnnnnnnnnnnnnnnnnnnnnnnnnnnnnnnnnnnnnnnnnnnnnnnnnnnnnnnnnnnnnnnnnnnnnnnnnnnnnnnnnnnnnnnnnnnnnnnnnnnnnnnnnnnnnnnnnnnnnnnnnnnnnnnnnnnnnnnnnnnnnnnnnnnnnnnnnnnnnnnnnnnnnnnnnnnnnnnnnnnnnnnnnnnnnnnnnnnnnnnnnnnnnnnnnnnnnnnnnnnnnnnnnnnnnnnnnnnnnnnnnnnnnnnnnnnnnnnnnnnnnnnnnnnnnnnnnnnnnnnnnnnnnnnnnnnnnnnnnnnnnnnnnnnnnnnnnnnnnnnnnnnnnnnnnnnnnnnnnnnnnnnnnnnnnnnnnnnnnnnnnnnnnnnnnnnnnnnnnnnnnnnnnnnnnnnnnnnnnnnnnnnnnnnnnnnnnnnnnnnnnnnnnnnnnnnnnttttttattcagaggctcactcttgcacaaagcatgtatctgaaagaaatctgggattatctgacccatgatgaacaggaactgtttgaagtcattaataaaaagttactggcacatttttctgatgccagctcataaagtgcgaaatatctgaggatgctggatagcttcaggcaagagaataatgattcttgcagatgtgtttttccggatacaaaaacaaaagtaaaaaattgcagcgccaggccacctttcaaagcagggaggcctgtaccgcgtcgaaaatttcagccagttaatgtaattgtctgaaccaggcacttcgcccgggcaggagaaggagcgtggttgcggtcatcctgtatactgaagtcgttatgaaggaataatacaaataattgcccgttttctctgtacgatagaggcaggtgtgtatgattgcattactatgtttttgtgatataaaaactaaatggtgagatatgcattttaaaatataacaaaaatcaccatgaaataagaataattatccacggagaacataaactgcagactgttacaatgcatgctgttcatcttgacaatgtcggtaatgactccaacttattgatagtgttttatgttcagataatgcccgatgactttgtcatgcagctccaccgattttgagaacgacagcgacttccgtcccagccgtgccaggtgctgcctcagattcaggttatgccgctcaattcgctgcgtatatcgcttgctgattacgtgcagctttcccttcaggcgggattcatacagcggccagccatccgtcatccatatcaccacgtcaaagggtgacagcaggctcataagacgccccagcgtcgccatcgtgcgttcaccgaatacgtgcgcaacaaccgtcttccggagcctgtcatacgcgtaaaacagccagcgctggcgcgatttagccccgacatagccccactgttcgcccatttccgcgcagacgatgacgtcactgcccggctgtatgcgcgaggttaccgactgcggcctgagttttttaagtgacgtaaaatcgtgttgaggccaacgcccataatgcgggctgttgcccggcatccaacgccattcatggccatatcaatgattttctggtgcgtaccgggttgagaagcggtgtaagtgaactgcagttgccatgttttacggcagtgagagcagagatagcgctgatgtccggcggtgcttttgccgttacgcaccaccccgtcagtagctgaacaggagggacagctgatagaaacagaagccactggagcacctcaaaaacaccatcatacactaaatcagtaagttggcagcatcaccnnnnnnnnnnnnnnnnnnnnnnnnnnnnnnnnnnnnnnnnnnnnnnnnnnnnnnnnnnnnnnnnnnnnnnnnnnnnnnnnnnnnnnnnnnnnnnnnnnnnnnnnnnnnnnnnnnnnnnnnnnnnnnnnnnnnnnnnnnnnnnnnnnnnnnnnnnnnnnnnnnnnnnnnnnnnnnnnnnnnnnnnnnnnnnnnnnnnnnnnnnnnnnnnnnnnnnnnnnnnnnnnnnnnnnnnnnnnnnnnnnnnnnnnnnnnnnnnnnnnnnnnnnnnnnnnnnnnnnnnnnnnnnnnnnnnnnnnnnnnnnnnnnnnnnnnnnnnnnnnnnnnnnnnnnnnnnnnnnnnnnnnnnnnnnnnnnnnnnnnnnnnnnnnnnnnnnnnnnnnnnnnnnnnnnnnnnnnnnnnnnnnnnnnnnnnnnnnnnnnnnnnnnnnnnnnnnnnnnnnnnnnnnnnnnnnnnnnnnnnnnnnnnnnnnnnnnnnnnnnnnnnnnnnnnnnnnnnnnnnnnnnnnnnnnnnnnnnnnnnnnnnnnnnnnnnnnnnnnnnnnnnnnnnnnnnnnnnnnnnnnnnnnnnnnnnnnnnnnnnnnnnnnnnnnnnnnnnnnnnnnnnnnnnnnnnnnnnnnnnnnnnnnnnnnnnnnnnnnnnnnnnnnnnnnnnnnnnnnnnnnnnnnnnnnnnnnnnnnnnnnnnnnnnnnnnnnnnnnnnnnnnnnnnnnnnnnnnnnnnnnnnnnnnnnnnnnnnnnnnnnnnnnnnnnnnnnnnnnnnnnnnnnnnnnnnnnnnnnnnnnnnnnnnnnnnnnnnnnnnnnnnnnnnnnnnnnnnnnnnnnnnnnnnnnnnnnnnnnnnnnnnnnnnnnnnnnnnnnnnnnnnnnnnnnnnnnnnnnnnnnnnnnnnnnnnnnnnnnnnnnnnnnnnnnnnnnnnnnnnnnnnnnnnnnnnnnnnnnnnnnnnnnnnnnnnnnnnnnnnnnnnnnnnnnnnnnnnnnnnnnnnnnnnnnnnnnnnnnnnnnnnnnnnnnnnnnnnnnnnnnnnnnnnnnnnnnnnnnnnnnnnnnnnnnnnnnnnnnnnnnnnnnnnnnnnnnnnnnnnnnnnnnnnnnnnnnnnnnnnnnnnnnnnnnnnnnnnnnnnnnnnnnnnnnnnnnnnnnnnnnnnnnnnnnnnnnnnnnnnnnnnnnnnnnnnnnnnnnnnnnnnnnnnnnnnnnnnnnnnnnnnnnnnnnnnnnnnnnnnnnnnnnnnnnnnnnnnnnnnnnnnnnnnnnnnnnnnnnnnnnnnnnnnnnnnnnnnnnnnnnnnnnnnnnnnnnnnnnnnnnnnnnnnnnnnnnnnnnnnnnnnnnnnnnnnnnnnnnnnnnnnnnnnnnnnnnnnnnnnnnnnnnnnnnnnnnnnnnnnnnnnnnnnnnnnnnnnnnnnnnnnnnnnnnnnnnnnnnnnnnnnnnnnnnnnnnnnnnnnnnnnnnnnnnnnnnnnnnnnnnnnnnnnnnnnnnaaagattaattttatctacttgagcatgtaaactttgtatagaatgcaccaactctttttttcgaggtgggtatgatgacatatttgcaacaatcatggggtaatattttaattaatattgcatgttaatgaaaactatcaacgtattgatagtc

SEQ ID NO: 3 - DNA, 10 bp, Escherichia coli
  source 1..10: mol_type = genomic DNA
agtaaaccac

SEQ ID NO: 4 - DNA, 19 bp, Escherichia coli
  source 1..19: mol_type = genomic DNA
ctgctacggcctggtgttt

SEQ ID NO: 5 - DNA, 17 bp, Escherichia coli
  source 1..17: mol_type = genomic DNA
cacgccacttttccatt

SEQ ID NO: 6 - DNA, 14 bp, Escherichia coli
  source 1..14: mol_type = genomic DNA
aaagtacctgcatt

SEQ ID NO: 7 - DNA, 41 bp, Escherichia coli
  source 1..41: mol_type = genomic DNA
tccaccatgtttgagtttgttccggaaagtctttccgggtc

SEQ ID NO: 8 - DNA, 2079 bp, Escherichia coli
  source 1..2079: mol_type = genomic DNA
accgtgtacgtacaagcagtgggagcctcttaatggggtgactgcgtaccttttgtataatgggtcagcgacttatattctgtagcaaggttaaccgaataggggagccgaagggaaaccgagtcttaactgggcgttaagttgcagggtatagacccgaaacccggtgatctagccatgggcaggttgaaggttgggtaacactaactggaggaccgaaccgactaatgttgaaaaattagcggatgacttgtggctgggggtgaaaggccaatcaaaccgggagatagctggttctccccgaaagctatttaggtagcgcctcgtgaattcatctccgggggtagagcactgtttcggcaagggggtcatcccgacttaccaacccgatgcaaactgcgaataccggagaatgttatcacgggagacacacggcgggtgctaacgtccgtcgtgaagagggaaacaacccagaccgccagctaaggtcccaaagtcatggttaagtgggaaacgatgtgggaaggcccagacagccaggatgttggcttagaagcagccatcatttaaagaaagcgtaatagctcactggtcgagtcggcctgcgcggaagatgtaacggggctaaaccatgcaccgaagctgcggcagcgacactatgtgttgttgggtaggggagcgttctgtaagcctgtgaaggtggcctgtgagggttgctggaggtatcagaagtgcgaatgctgacataagtaacgataaagcgggtgaaaagcccgctcgccggaagaccaagggttcctgtccaacgttaatcggggcagggtgagtcgacccctaaggcgaggccgaaaggcgtagtcgatgggaaacaggttaatattcctgtacttggtgttactgcgaaggggggacggagaaggctatgttggccgggcgacggttgtcccggtttaagcgtgtaggctggttttccaggcaaatccggaaaaccaaggctgaggcgtgatgacgaggcactacggtgctgaagcgacaaatgccctgcttccaggaaaagcctctaagcatcaggtaacatcaaatcgtaccccaaaccgacacaggtggtcaggtagagaataccaaggcgcttgagagaactcgggtgaaggaactaggcaaaatggtgccgtaacttcgggagaaggcacgctgatatgtaggtgaagcgacttgctcgtggagctgaaatcagtcgaagataccagctggctgcaactgtttattaaaaacacagcactgtgcaaacacgaaagtggacgtatacggtgtgacgcctgcccggtgccggaaggttaattgatggggttagcggtaacgcgaagctcttgatcgaagccccggtaaacggcggccgtaactataacggtcctaaggtagcgaaattccttgtcgggtaagttccgacctgcacgaatggcgtaatgatggccaggctgtctccacccgagactcagtgaaattgaactcgctgtgaagatgcagtgtacccgcggcaagacggaaagaccccgtgaacctttactatagcttgacactgaacattgagccttgatgtgtaggataggtgggaggctttgaagtgtggacgccagtctgcatggagccgaccttgaaataccaccctttaatgtttgatgttctaacgttggcccgtaatccgggttgcggacagtgtctggtgggtagtttgactggggcggtctcctcctaaagagtaacggaggagcacgaaggttggctaatcctggtcggacatcaggaggttagtgcaatggcataagccagcttgactgcgagcgtgacggcgcgagcaggtgcgaaagcaggtcatagtgatccggtggttctgaatggaagggccatcgctcaacggataaaaggtactccggggataacaggctgataccgcccaagagttcatatcgacggcggtgtttggcacctcgatgtcggctcatcacatcctggggctgaagtaggtcccaagggtatggctgttcgccatttaaagtggtacgcgagctgggtttagaacgt

SEQ ID NO: 9 - DNA, 15 bp, Escherichia coli
  source 1..15: mol_type = genomic DNA
gtgcgtttgcagcac
